(19) United States
(12) Patent Application Publication
(10) Pub. No.: US 2021/0292778 A1
(43) Pub. Date: Sep. 23, 2021

(54) COMPOSITIONS AND METHODS TO CONTROL INSECT PESTS

(71) Applicant: PIONEER HI-BRED INTERNATIONAL, INC., JOHNSTON, IA (US)

(72) Inventors: COURTNEY ANNE DAVIS-VOGEL, ANKENY, IA (US); XU HU, JOHNSTON, IA (US); XIPING NIU, JOHNSTON, IA (US); AMIT SETHI, JOHNSTON, IA (US)

(73) Assignee: PIONEER HI-BRED INTERNATIONAL, INC., JOHNSTON, IA (US)

(21) Appl. No.: 16/316,184

(22) PCT Filed: Jun. 27, 2017
(86) PCT No.: PCT/US17/39374

§ 371 Date: Jan. 8, 2019

Related U.S. Application Data
(60) Provisional application No. 62/461,384, filed on Feb. 21, 2017.
(60) Provisional application No. 62/361,169, filed on Jul. 12, 2016.

(51) Int. Cl. C12N 15/82; A01N 63/60

(52) U.S. Cl. CPC C12N 15/8218; A01N 63/60; C12N 15/8286

(57) ABSTRACT

Methods and compositions are provided which employ a silencing element that, when ingested by a plant insect pest, such as Coleopteran, Hemiptera, or Lepidopteran plant pest, including a Diabrotica, Leptinotarsa, Phyllotreta, Acyrthosiphan, Bemisia, Halyomorpha, Nezara, or Spodoptera plant pest, decrease the expression of a target sequence in the pest. Disclosed are various target polynucleotides set forth in any one of SEQ ID NOS: 1-398 disclosed herein, or variants and fragments thereof, or complements thereof, wherein a decrease in expression of one or more of the sequences in the target pest controls the pest. Plants, plant parts, bacteria and other host cells comprising the silencing elements or an active variant or fragment thereof of the invention are also provided.

### CROSS-REFERENCE TO RELATED APPLICATIONS

[0001] This application claims priority to International Patent Application PCT/US2017/39374 filed on Jun. 27, 2017, which claims priority to U.S. Provisional Application No. 62/461,384, filed Feb. 21, 2017 and U.S. Provisional Application No. 62/361,169 filed Jul. 12, 2016, the contents of which are herein incorporated by reference in their entirety.

### REFERENCE TO SEQUENCE LISTING SUBMITTED ELECTRONICALLY

[0002] A sequence listing having the file name “7141WOPCT_SequenceList.txt” created on Jun. 14, 2017 and having a size of 1666 kilobytes is filed in computer readable form concurrently with the specification. The sequence listing is part of the specification and is herein incorporated by reference in its entirety.

### FIELD

[0003] The present invention relates generally to methods of molecular biology and gene silencing to control pests.

### BACKGROUND

[0004] Plant insect pests are a serious problem in agriculture. They destroy millions of acres of staple crops such as corn, soybeans, peas, and cotton. Yearly, plant insect pests cause over $100 billion dollars in crop damage in the U.S. alone. In an ongoing seasonal battle, farmers must apply billions of gallons of synthetic pesticides to combat these pests. Other methods employed in the past delivered insecticidal activity by microorganisms or genes derived from microorganisms expressed in transgenic plants. For example, certain species of microorganisms of the genus Bacillus are known to possess pesticidal activity against a broad range of insect pests including Lepidoptera, Diptera, Coleoptera, Hemiptera, and others. In fact, microbial pesticides, particularly those obtained from Bacillus strains, have played an important role in agriculture as alternatives to chemical pest control. Agricultural scientists have developed crop plants with enhanced insect resistance by genetically engineering crop plants to produce insecticidal proteins from Bacillus. For example, corn and cotton plants genetically engineered to produce Cry toxins (see, e.g., Aronson (2002) Cell Mol. Life Sci. 59(3):417-425; Schnepf et al. (1998) Microbiol. Mol. Biol. Rev. 62(3):775-806) are now widely used in agriculture and have provided the farmer with an alternative to traditional insect-control methods. However, in some instances these Bt insecticidal proteins may only protect plants from a relatively narrow range of pests. Evolving insect resistance has also presented an issue (Gassmann et al. (2014) PNAS 111(14):5141-6). Thus, novel insect control compositions remain desirable.

### SUMMARY

[0005] Methods and compositions are provided which employ one or more silencing elements that, when ingested by a plant insect pest, such as Coleopteran, Hemiptera, or Lepidopteran plant pest, including a Diabrotica, Leptinotarsa, Phyllotreta, Acyrthosiphan, Bemisia, Halyomorpha, Ostrinia, Lygus, Helicoverpa, Nezara, or Spodoptera plant pest, are capable of decreasing the expression of a target sequence in the pest. In certain embodiments, the decrease in expression of the target sequence and controls the pest, and thereby the methods and compositions are capable of limiting damage to a plant. Described herein are various target polynucleotides as set forth in SEQ ID NOS.: 1-398, or variants or fragments thereof, or complements thereof that modulate the expression of one or more of the sequences in the target pest RNAs. Also provided are silencing elements, which when ingested by the pest, decrease the level of expression of one or more of the target polynucleotides. Further provided are constructs encoding silencing elements and host cells comprising constructs encoding silencing elements. Plants, plant parts, plant cells, bacteria and other host cells comprising constructs encoding the silencing elements or an active variant or fragment thereof are also provided. Also provided are formulations of sprayable silencing agents for topical applications to pest insects or substrates where pest insects may be found.

[0006] In another embodiment, methods for controlling a plant insect pest, such as a Coleopteran, Hemiptera, or Lepidopteran plant pest, including a Diabrotica, Leptinotarsa, Phyllotreta, Acyrthosiphan, Bemisia, Halyomorpha, Ostrinia, Lygus, Helicoverpa, Nezara, or Spodoptera plant pest, are provided. The methods comprise feeding to a plant insect pest a composition comprising a silencing element, wherein the silencing element, when ingested by the pest, reduces the level of a target sequence in the pest and thereby controls the pest. Further provided are methods to protect a plant from a plant insect pest. Such methods comprise introducing into the plant or plant part a disclosed silencing element. When the plant expressing the silencing element is ingested by the pest, the level of the target sequence is decreased and the pest is controlled.

### DESCRIPTION OF FIGURES

[0007] FIG. 1 shows Western Corn Rootworm (WCRW) larvae exposed to dsRNA targeting selected WCRW gene targets as 24-hour-old neonates (Drosha, Pasha, or R2D2). Three samples were collected per treatment at seven days post-exposure for gene expression analysis, each containing approximately 30 insects. The graph shows median normalized expression value for each treatment, with error bars representing the median absolute deviation.

[0008] FIG. 2 shows Western Corn Rootworm (WCRW) larvae exposed to dsRNA targeting selected WCRW gene targets as 24-hour-old neonates (DCR-1, DCR-2, or AGO1). Three samples were collected per treatment at seven days post-exposure for gene expression analysis, each containing approximately 30 insects. The graph shows median normalized expression value for each treatment, with error bars representing the median absolute deviation.

[0009] FIG. 3 shows Western Corn Rootworm (WCRW) adults exposed to dsRNA targeting DCR-1 as late third instar larvae. Larvae were allowed to pupate and emerged adults were collected during the pre-oviposition period (i.e. 10 days post-emergence). Three samples per treatment and sex were collected, each containing 8 insects, and expression levels of the DCR-1 transcript were assessed. The graph shows median normalized expression value for each treatment, with error bars representing the median absolute deviation.

[0010] FIG. 4 shows Western Corn Rootworm (WCRW) pupae exposed to dsRNA targeting Drosha, DCR-2, Pasha, or R2D2 as late third instar larvae. A set of 24 pupae per treatment were sampled 12 days after placement into pupation medium for gene suppression analysis. Three samples per treatment were collected, each containing 8 insects, and expression levels of each target transcript were assessed. The graph shows median normalized expression value for each treatment, with error bars representing the median absolute deviation.

[0011] FIG. 5 shows Western Corn Rootworm (WCRW) exposed to dsRNA targeting AGO1 as late third instar larvae. A set of 24 third instar larvae per treatment were sampled 48-hours after initial exposure to the treatment diet for gene suppression analysis. Three samples per treatment were collected, each containing 8 insects, and expression levels of each target transcript were assessed. The graph shows median normalized expression value for each treatment, with error bars representing the median absolute deviation.

### DETAILED DESCRIPTION

[0012] The disclosures herein will be described more fully hereinafter with reference to the accompanying drawings, in which some, but not all possible embodiments are shown. Indeed, disclosures may be embodied in many different forms and should not be construed as limited to the embodiments set forth herein.

[0013] Many modifications and other embodiments disclosed herein will come to mind to one skilled in the art to which the disclosed compositions and methods pertain having the benefit of the teachings presented in the foregoing descriptions and the associated drawings. Therefore, it is to be understood that the disclosures are not to be limited to the specific embodiments disclosed and that modifications and other embodiments are intended to be included within the scope of the appended claims. Although specific terms are employed herein, they are used in a generic and descriptive sense only and not for purposes of limitation.

[0014] It is also to be understood that the terminology used herein is for the purpose of describing particular aspects only and is not intended to be limiting. Unless defined otherwise, all technical and scientific terms used herein have the same meaning as commonly understood by one of ordinary skill in the art to which the disclosed compositions and methods belong. In this specification and in the claims which follow, reference will be made to a number of terms which shall be defined herein.

[0015] As used herein the singular forms “a”, “and”, and “the” include plural referents unless the context clearly dictates otherwise. Thus, for example, reference to “a cell” includes a plurality of such cells and reference to “the protein” includes reference to one or more proteins and equivalents thereof known to those skilled in the art, and so forth. All technical and scientific terms used herein have the same meaning as commonly understood to one of ordinary skill in the art to which this invention belongs unless clearly indicated otherwise.

### I. Overview

[0016] Methods and compositions are provided which employ one or more silencing elements that, when ingested by a plant insect pest, such as Coleopteran, Hemiptera, or Lepidopteran plant pest, including a Diabrotica, Leptinotarsa, Phyllotreta, Acyrthosiphan, Bemisia, Halyomorpha, Ostrinia, Lygus, Helicoverpa, Nezara, or Spodoptera plant pest, are capable of decreasing the expression of a target sequence in the pest. Disclosed herein are target polynucleotides as set forth in SEQ ID NOS.: 1-398, or variants and fragments thereof, and complements thereof. Silencing elements comprising sequences, complementary sequences, active fragments or variants of these target polynucleotides are provided which, when ingested by or when contacting the pest, decrease the expression of one or more of the target sequences and thereby controls the pest. In another embodiment, silencing elements comprising sequences, complementary sequences, active fragments or variants of these target polynucleotides are provided which, when ingested by or when contacting the pest, decrease the expression of one or more of the target sequences and thereby reduces fecundity, sterilizes, or controls offspring of the exposed pest. In some embodiments, a transgenic plant comprising a polynucleotide encoding silencing elements are provided which, when ingested by or when contacting the pest, decrease the expression of one or more of the target sequences and thereby controls the pest.

[0017] In one embodiment, compositions and methods are provided which employ a silencing element, comprising at least one double-stranded RNA region, at least one strand of which comprises a polynucleotide that is complementary to: (a) a nucleotide sequence comprising a sequence of an RNA transcript expressed in a target pest, wherein the silencing element has insecticidal activity against an insect plant pest; or variants and fragments thereof, and complements of said nucleotide sequence; (b) the nucleotide sequence comprising at least 90% sequence identity to said nucleotide sequence; or variants and fragments thereof, and complements thereof; or (c) the nucleotide sequence comprising at least 19 consecutive nucleotides of said nucleotide sequence; or variants and fragments thereof, and complements thereof; wherein the polynucleotide encodes a silencing element, wherein the silencing element has insecticidal activity against an insect plant pest.

[0018] In further embodiment, compositions and methods are provided which employ a silencing element comprising at least one double-stranded RNA region, at least one strand of which comprises a polynucleotide that is complementary to: (a) a nucleotide sequence comprising a sequence of an RNA transcript expressed in an insect plant pest, wherein the silencing element has insecticidal activity against an insect plant pest; or variants and fragments thereof, and complements of said nucleotide sequence; (b) the nucleotide sequence comprising at least 90% sequence identity to said nucleotide sequence; or variants and fragments thereof, and complements thereof; or (c) the nucleotide sequence comprising at least 19 consecutive nucleotides of said nucleotide sequence; or variants and fragments thereof, and complements thereof; wherein the silencing element has insecticidal activity against an insect plant pest.

[0019] In another embodiment, compositions and methods are provided which employ a silencing element comprising at least one double-stranded RNA region, at least one strand of which comprises a polynucleotide that is complementary to: (a) the nucleotide sequence comprising any one of SEQ ID NOS: 1-398 or variants and fragments thereof, and complements thereof; (b) the nucleotide sequence comprising at least 90% sequence identity to any one of nucleotides SEQ ID NOS: 1-398; or variants and fragments thereof, and complements thereof; or (c) the nucleotide sequence comprising at least 19 consecutive nucleotides of any one of SEQ ID NOS: 1-398; or variants and fragments thereof, and complements thereof; wherein the silencing element has insecticidal activity against an insect plant pest.

[0020] In another embodiment, compositions and methods are provided which employ DNA constructs encoding one or more silencing elements, which when ingested by the pest, decrease the level of expression of one or more of the target polynucleotides, and thereby controls the plant pest. In another embodiment, plants, plant parts, seed, plant cells, bacteria and other host cells comprising DNA constructs encoding the silencing elements or an active variant or fragment thereof are also provided.

[0021] As used herein, by “controlling a plant insect pest” or “controls an insect plant pest” is intended any effect on a plant insect pest that results in limiting the damage that the pest causes. Controlling a plant insect pest includes, but is not limited to, killing the pest, inhibiting development of the pest, altering fertility or growth of the pest in such a manner that the pest provides less damage to the plant, or in a manner for decreasing the number of offspring produced, producing less fit pests, including offspring, producing pests more susceptible to predator attack, producing pests more susceptible to other insecticidal proteins, or deterring the pests from eating the plant.

[0022] Reducing the level of expression of the target polynucleotide or the polypeptide encoded thereby, in the pest results in the suppression, control, and/or killing the invading pest. In one embodiment, reducing the level of expression of the target sequence of the pest will reduce the pest damage by at least about 2% to at least about 6%, at least about 5% to about 50%, at least about 10% to about 60%, at least about 30% to about 70%, at least about 40% to about 80%, or at least about 50% to about 90% or greater. Hence, methods disclosed herein can be utilized to control pests, including but not limited to, Coleopteran plant insect pests or a Diabrotica plant pest.

[0023] Certain assays measuring the control of a plant insect pest are commonly known in the art, as are methods to record nodal injury score. See, for example, Oleson et al. (2005) J. Econ. Entomol. 98:1-8. Other assay methods are provided in the examples below.

[0024] Disclosed herein are compositions and methods for protecting plants from a plant insect pest, or inducing resistance in a plant to a plant insect pest, such as Coleopteran plant pests or Diabrotica plant pests or other plant insect pests. Plant insect pests include insects selected from the orders Coleoptera, Diptera, Hymenoptera, Lepidoptera, Mallophaga, Homoptera, Hemiptera Orthroptera, Thysanoptera, Dermaptera, Isoptera, Anoplura, Siphonaptera, Trichoptera, etc., particularly Lepidoptera and Coleoptera.

[0025] Those skilled in the art will recognize that not all compositions are equally effective against all pests. Disclosed compositions, including the silencing elements disclosed herein, display activity against plant insect pests, which may include economically important agronomic, forest, greenhouse, nursery ornamentals, food and fiber, public and animal health, domestic and commercial structure, household and stored product pests.

[0026] As used herein “Coleopteran plant pest” is used to refer to any member of the Coleoptera order. Other plant insect pests that may be targeted by the methods and compositions disclosed herein, but are not limited to Mexican Bean Beetle (Epilachna varivestis), Western Corn Rootworm (Diabrotica virgifera virgifera), Southern Corn Rootworm (Diabrotica undecimpunctata), Northern Corn Rootworm (Diabrotica Barberi), and Colorado potato beetle (Leptinotarsa decemlineata).

[0027] As used herein, the term “Diabrotica plant pest” is used to refer to any member of the Diabrotica genus. Accordingly, the compositions and methods are also useful in protecting plants against any Diabrotica plant pest including, for example, Diabrotica adelpha; Diabrotica amecameca; Diabrotica balteata; Diabrotica barberi; Diabrotica biannularis; Diabrotica cristata; Diabrotica decempunctata; Diabrotica dissimilis; Diabrotica lemniscata; Diabrotica limitata (including, for example, Diabrotica limitata quindecimpuncata); Diabrotica longicornis; Diabrotica nummularis; Diabrotica porracea; Diabrotica scutellata; Diabrotica sexmaculata; Diabrotica speciosa (including, for example, Diabrotica speciosa speciosa); Diabrotica tibialis; Diabrotica undecimpunctata (including, for example, Southern corn rootworm (Diabrotica undecimpunctata), Diabrotica undecimpunctata duodecimnotata; Diabrotica undecimpunctata howardi (spotted cucumber beetle); Diabrotica undecimpunctata undecimpunctata (western spotted cucumber beetle)); Diabrotica virgifera (including, for example, Diabrotica virgifera virgifera (western corn rootworm) and Diabrotica virgifera zeae (Mexican corn rootworm)); Diabrotica viridula; Diabrotica wartensis; Diabrotica sp. JJG335; Diabrotica sp. JJG336; Diabrotica sp. JJG341; Diabrotica sp. JJG356; Diabrotica sp. JJG362; and, Diabrotica sp. JJG365.

[0028] In certain embodiments, the Diabrotica plant pest comprises D. virgifera virgifera, D. barberi, D. virgifera zeae, D. speciosa, or D. undecimpunctata.

[0029] Larvae of the order Lepidoptera include, but are not limited to, armyworms, cutworms, loopers and heliothines in the family Noctuidae Spodoptera frugiperda JE Smith (fall armyworm); S. exigua Hübner (beet armyworm); S. litura Fabricius (tobacco cutworm, cluster caterpillar); Mamestra configurata Walker (bertha armyworm); M. brassicae Linnaeus (cabbage moth); Agrotis ipsilon Hufnagel (black cutworm); A. orthogonia Morrison (western cutworm); A. subterranea Fabricius (granulate cutworm); Alabama argillacea Hübner (cotton leaf worm); Trichoplusia ni Hübner (cabbage looper); Pseudoplusia includens Walker (soybean looper); Anticarsia gemmatalis Hübner (velvetbean caterpillar); Hypena scabra Fabricius (green cloverworm); Heliothis virescens Fabricius (tobacco budworm); Pseudaletia unipuncta Haworth (armyworm); Athetis mindara Barnes and Mcdunnough (rough skinned cutworm); Euxoa messoria Harris (darksided cutworm); Earias insulana Boisduval (spiny bollworm); E. vittella Fabricius (spotted bollworm); Helicoverpa armigera Hübner (American bollworm); H. zea Boddie (corn earworm or cotton bollworm); Melanchra picta Harris (zebra caterpillar); Egira (Xylomyges) curialis Grote (citrus cutworm); borers, casebearers, webworms, coneworms, and skeletonizers from the family Pyralidae Ostrinia nubilalis Hübner (European corn borer); Amyelois transitella Walker (naval orangeworm); Anagasta kuehniella Zeller (Mediterranean flour moth); Cadra cautella Walker (almond moth); Chilo suppressalis Walker (rice stem borer); C. partellus, (sorghum borer); Corcyra cephalonica Stainton (rice moth); Crambus caliginosellus Clemens (corn root webworm); C. teterrellus Zincken (bluegrass webworm); Cnaphalocrocis medinalis Guenée (rice leaf roller); Desmia funeralis Hübner (grape leaffolder); Diaphania hyalinata Linnaeus (melon worm); D. nitidalis Stoll (pickleworm); Diatraea grandiosella Dyar (southwestern corn borer), D. saccharalis Fabricius (surgarcane borer); Eoreuma loftini Dyar (Mexican rice borer); Ephestia elutella Hübner (tobacco (cacao) moth); Galleria mellonella Linnaeus (greater wax moth); Herpetogramma licarsisalis Walker (sod webworm); Homoeosoma electellum Hulst (sunflower moth); Elasmopalpus lignosellus Zeller (lesser cornstalk borer); Achroia grisella Fabricius (lesser wax moth); Loxostege sticticalis Linnaeus (beet webworm); Orthaga thyrisalis Walker (tea tree web moth); Maruca testulalis Geyer (bean pod borer); Plodia interpunctella Hübner (Indian meal moth); Scirpophaga incertulas Walker (yellow stem borer); Udea rubigalis Guenée (celery leaftier); and leafrollers, budworms, seed worms and fruit worms in the family Tortricidae Acleris gloverana Walsingham (Western blackheaded budworm); A. variana Fernald (Eastern blackheaded budworm); Archips argyrospila Walker (fruit tree leaf roller); A. rosana Linnaeus (European leaf roller); and other Archips species, Adoxophyes orana Fischer von Rösslerstamm (summer fruit tortrix moth); Cochylis hospes Walsingham (banded sunflower moth); Cydia latiferreana Walsingham (filbertworm); C. pomonella Linnaeus (coding moth); Platynota flavedana Clemens (variegated leafroller); P. stultana Walsingham (omnivorous leafroller); Lobesia botrana Denis & Schiffermiiller (European grape vine moth); Spilonota ocellana Denis & Schiffermüller (eyespotted bud moth); Endopiza viteana Clemens (grape berry moth); Eupoecilia ambiguella Hübner (vine moth); Bonagota salubricola Meyrick (Brazilian apple leafroller); Grapholita molesta Busck (oriental fruit moth); Suleima helianthana Riley (sunflower bud moth); Argyrotaenia spp.; Choristoneura spp.

[0030] Selected other agronomic pests in the order Lepidoptera include, but are not limited to, Alsophila pometaria Harris (fall cankerworm); Anarsia lineatella Zeller (peach twig borer); Anisota senatoria J. E. Smith (orange striped oakworm); Antheraea pernyi Guérin-Méneville (Chinese Oak Tussah Moth); Bombyx mori Linnaeus (Silkworm); Bucculatrix thurberiella Busck (cotton leaf perforator); Colias eurytheme Boisduval (alfalfa caterpillar); Datana integerrima Grote & Robinson (walnut caterpillar); Dendrolimus sibiricus Tschetwerikov (Siberian silk moth), Ennomos subsignaria Hübner (elm spanworm); Erannis tiliaria Harris (linden looper); Euproctis chrysorrhoea Linnaeus (browntail moth); Harrisina americana Guérin-Méneville (grapeleaf skeletonizer); Hemileuca oliviae Cockrell (range caterpillar); Hyphantria cunea Drury (fall webworm); Keiferia lycopersicella Walsingham (tomato pinworm); Lambdina fiscellaria fiscellaria Hulst (Eastern hemlock looper); L. fiscellaria lugubrosa Hulst (Western hemlock looper); Leucoma salicis Linnaeus (satin moth); Lymantria dispar Linnaeus (gypsy moth); Manduca quinquemaculata Haworth (five spotted hawk moth, tomato hornworm); M. sexta Haworth (tomato hornworm, tobacco hornworm); Operophtera brumata Linnaeus (winter moth); Paleacrita vernata Peck (spring cankerworm); Papilio cresphontes Cramer (giant swallowtail orange dog); Phryganidia californica Packard (California oakworm); Phyllocnistis citrella Stainton (citrus leafminer); Phyllonorycter blancardella Fabricius (spotted tentiform leafminer); Pieris brassicae Linnaeus (large white butterfly); P. rapae Linnaeus (small white butterfly); P. napi Linnaeus (green veined white butterfly); Platyptilia carduidactyla Riley (artichoke plume moth); Plutella xylostella Linnaeus (diamondback moth); Pectinophora gossypiella Saunders (pink bollworm); Pontia protodice Boisduval and Leconte (Southern cabbageworm); Sabulodes aegrotata Guenée (omnivorous looper); Schizura concinna J. E. Smith (red humped caterpillar); Sitotroga cerealella Olivier (Angoumois grain moth); Thaumetopoea pityocampa Schiffermuller (pine processionary caterpillar); Tineola bisselliella Hummel (webbing clothesmoth); Tuta absoluta Meyrick (tomato leafminer); Yponomeuta padella Linnaeus (ermine moth); Heliothis subflexa Guenée; Malacosoma spp. and Orgyia spp.

[0031] Of interest are larvae and adults of the order Coleoptera including weevils from the families Anthribidae, Bruchidae and Curculionidae (including, but not limited to: Anthonomus grandis Boheman (boll weevil); Lissorhoptrus oryzophilus Kuschel (rice water weevil); Sitophilus granarius Linnaeus (granary weevil); S. oryzae Linnaeus (rice weevil); Hypera punctata Fabricius (clover leaf weevil); Cylindrocopturus adspersus LeConte (sunflower stem weevil); Smicronyx fulvus LeConte (red sunflower seed weevil); S. sordidus LeConte (gray sunflower seed weevil); Sphenophorus maidis Chittenden (maize billbug)); flea beetles, cucumber beetles, rootworms, leaf beetles, potato beetles and leafminers in the family Chrysomelidae (including, but not limited to: Leptinotarsa decemlineata Say (Colorado potato beetle); Diabrotica virgifera virgifera LeConte (western corn rootworm); D. barberi Smith and Lawrence (northern corn rootworm); D. undecimpunctata howardi Barber (southern corn rootworm); Chaetocnema pulicaria Melsheimer (corn flea beetle); Phyllotreta cruciferae Goeze (Crucifer flea beetle); Phyllotreta striolata (stripped flea beetle); Colaspis brunnea Fabricius (grape colaspis); Oulema melanopus Linnaeus (cereal leaf beetle); Zygogramma exclamationis Fabricius (sunflower beetle)); beetles from the family Coccinellidae (including, but not limited to: Epilachna varivestis Mulsant (Mexican bean beetle)); chafers and other beetles from the family Scarabaeidae (including, but not limited to: Popillia japonica Newman (Japanese beetle); Cyclocephala borealis Arrow (northern masked chafer, white grub); C. immaculata Olivier (southern masked chafer, white grub); Rhizotrogus majalis Razoumowsky (European chafer); Phyllophaga crinita Burmeister (white grub); Ligyrus gibbosus De Geer (carrot beetle)); carpet beetles from the family Dermestidae; wireworms from the family Elateridae, Eleodes spp., Melanotus spp.; Conoderus spp.; Limonius spp.; Agriotes spp.; Ctenicera spp.; Aeolus spp.; bark beetles from the family Scolytidae and beetles from the family Tenebrionidae.

[0032] Adults and immatures of the order Diptera are of interest, including leafminers Agromyza parvicornis Loew (corn blotch leafminer); midges (including, but not limited to: Contarinia sorghicola Coquillett (sorghum midge); Mayetiola destructor Say (Hessian fly); Sitodiplosis mosellana Gain (wheat midge); Neolasioptera murtfeldtiana Felt, (sunflower seed midge)); fruit flies (Tephritidae), Oscinella frit Linnaeus (fruit flies); maggots (including, but not limited to: Delia platura Meigen (seedcorn maggot); D. coarctata Fallen (wheat bulb fly) and other Delia spp., Meromyza americana Fitch (wheat stem maggot); Musca domestica Linnaeus (house flies); Fannia canicularis Linnaeus, F. femoralis Stein (lesser house flies); Stomoxys calcitrans Linnaeus (stable flies)); face flies, horn flies, blow flies, Chrysomya spp.; Phormia spp. and other muscoid fly pests, horse flies Tabanus spp.; bot flies Gastrophilus spp.; Oestrus spp.; cattle grubs Hypoderma spp.; deer flies Chrysops spp.; Melophagus ovinus Linnaeus (keds) and other Brachycera, mosquitoes Aedes spp.; Anopheles spp.; Culex spp.; black flies Prosimulium spp.; Simulium spp.; biting midges, sand flies, sciarids, and other Nematocera.

[0033] Included as insects of interest are adults and nymphs of the orders Hemiptera and Homoptera such as, but not limited to, adelgids from the family Adelgidae, plant bugs from the family Miridae, cicadas from the family Cicadidae, leafhoppers, Empoasca spp.; from the family Cicadellidae, planthoppers from the families Cixiidae, Flatidae, Fulgoroidea, Issidae and Delphacidae, treehoppers from the family Membracidae, psyllids from the family Psyllidae, whiteflies from the family Aleyrodidae, aphids from the family Aphididae, phylloxera from the family Phylloxeridae, mealybugs from the family Pseudococcidae, scales from the families Asterolecanidae, Coccidae, Dactylopiidae, Diaspididae, Eriococcidae Ortheziidae, Phoenicococcidae and Margarodidae, lace bugs from the family Tingidae, stink bugs from the family Pentatomidae, cinch bugs, Blissus spp.; and other seed bugs from the family Lygaeidae, spittlebugs from the family Cercopidae squash bugs from the family Coreidae and red bugs and cotton stainers from the family Pyrrhocoridae.

[0034] Agronomically important members from the order Homoptera further include, but are not limited to: Acyrthisiphon pisum Harris (pea aphid); Aphis craccivora Koch (cowpea aphid); A. fabae Scopoli (black bean aphid); A. gossypii Glover (cotton aphid, melon aphid); A. maidiradicis Forbes (corn root aphid); A. pomi De Geer (apple aphid); A. spiraecola Patch (spirea aphid); Aulacorthum solani Kaltenbach (foxglove aphid); Chaetosiphon fragaefolii Cockerell (strawberry aphid); Diuraphis noxia Kurdjumov/Mordvilko (Russian wheat aphid); Dysaphis plantaginea Paaserini (rosy apple aphid); Eriosoma lanigerum Hausmann (woolly apple aphid); Brevicoryne brassicae Linnaeus (cabbage aphid); Hyalopterus pruni Geoffroy (mealy plum aphid); Lipaphis erysimi Kaltenbach (turnip aphid); Metopolophium dirrhodum Walker (cereal aphid); Macrosiphum euphorbiae Thomas (potato aphid); Myzus persicae Sulzer (peach-potato aphid, green peach aphid); Nasonovia ribisnigri Mosley (lettuce aphid); Pemphigus spp. (root aphids and gall aphids); Rhopalosiphum maidis Fitch (corn leaf aphid); R. padi Linnaeus (bird cherry-oat aphid); Schizaphis graminum Rondani (greenbug); Sipha flava Forbes (yellow sugarcane aphid); Sitobion avenae Fabricius (English grain aphid); Therioaphis maculata Buckton (spotted alfalfa aphid); Toxoptera aurantii Boyer de Fonscolombe (black citrus aphid) and T. citricida Kirkaldy (brown citrus aphid); Adelges spp. (adelgids); Phylloxera devastatrix Pergande (pecan phylloxera); Bemisia tabaci Gennadius (tobacco whitefly, sweetpotato whitefly); B. argentifolii Bellows & Perring (silverleaf whitefly); Dialeurodes citri Ashmead (citrus whitefly); Trialeurodes abutiloneus (bandedwinged whitefly) and T. vaporariorum Westwood (greenhouse whitefly); Empoasca fabae Harris (potato leafhopper); Laodelphax striatellus Fallen (smaller brown planthopper); Macrolestes quadrilineatus Forbes (aster leafhopper); Nephotettix cinticeps Uhler (green leafhopper); N. nigropictus Stål (rice leafhopper); Nilaparvata lugens Stål (brown planthopper); Peregrinus maidis Ashmead (corn planthopper); Sogatella furcifera Horvath (white-backed planthopper); Sogatodes orizicola Muir (rice delphacid); Typhlocyba pomaria McAtee (white apple leafhopper); Erythroneoura spp. (grape leafhoppers); Magicicada septendecim Linnaeus (periodical cicada); Icerya purchasi Maskell (cottony cushion scale); Quadraspidiotus perniciosus Comstock (San Jose scale); Planococcus citri Risso (citrus mealybug); Pseudococcus spp. (other mealybug complex); Cacopsylla pyricola Foerster (pear psylla); Trioza diospyri Ashmead (persimmon psylla).

[0035] Agronomically important species of interest from the order Hemiptera include, but are not limited to: Acrosternum hilare Say (green stink bug); Anasa tristis De Geer (squash bug); Blissus leucopterus leucopterus Say (chinch bug); Corythuca gossypii Fabricius (cotton lace bug); Cyrtopeltis modesta Distant (tomato bug); Dysdercus suturellus Herrich-Schïffer (cotton stainer); Euschistus servus Say (brown stink bug); E. variolarius Palisot de Beauvois (one-spotted stink bug); Graptostethus spp. (complex of seed bugs); Leptoglossus corculus Say (leaf-footed pine seed bug); Lygus lineolaris Palisot de Beauvois (tarnished plant bug); L. Hesperus Knight (Western tarnished plant bug); L. pratensis Linnaeus (common meadow bug); L. rugulipennis Poppius (European tarnished plant bug); Lygocoris pabulinus Linnaeus (common green capsid); Nezara viridula Linnaeus (southern green stink bug); Oebalus pugnax Fabricius (rice stink bug); Oncopeltus fasciatus Dallas (large milkweed bug); Pseudatomoscelis seriatus Reuter (cotton fleahopper).

[0036] Furthermore, embodiments may be effective against Hemiptera such, Calocoris norvegicus Gmelin (strawberry bug); Orthops campestris Linnaeus; Plesiocoris rugicollis Fallen (apple capsid); Cyrtopeltis modestus Distant (tomato bug); Cyrtopeltis notatus Distant (suckfly); Spanagonicus albofasciatus Reuter (whitemarked fleahopper); Diaphnocoris chlorionis Say (honeylocust plant bug); Labopidicola allii Knight (onion plant bug); Pseudatomoscelis seriatus Reuter (cotton fleahopper); Adelphocoris rapidus Say (rapid plant bug); Poecilocapsus lineatus Fabricius (four-lined plant bug); Nysius ericae Schilling (false chinch bug); Nysius raphanus Howard (false chinch bug); Nezara viridula Linnaeus (Southern green stink bug); Eurygaster spp.; Coreidae spp.; Pyrrhocoridae spp.; Tinidae spp.; Blostomatidae spp.; Reduviidae spp. and Cimicidae spp.

[0037] Also included are adults and larvae of the order Acari (mites) such as Aceria tosichella Keifer (wheat curl mite); Petrobia latens Müller (brown wheat mite); spider mites and red mites in the family Tetranychidae, Panonychus ulmi Koch (European red mite); Tetranychus urticae Koch (two spotted spider mite); (T. mcdanieli McGregor (McDaniel mite); T. cinnabarinus Boisduval (carmine spider mite); T. turkestani Ugarov & Nikolski (strawberry spider mite); flat mites in the family Tenuipalpidae, Brevipalpus lewisi McGregor (citrus flat mite); rust and bud mites in the family Eriophyidae and other foliar feeding mites and mites important in human and animal health, i.e., dust mites in the family Epidermoptidae, follicle mites in the family Demodicidae, grain mites in the family Glycyphagidae, ticks in the order Ixodidae. Ixodes scapularis Say (deer tick); I. holocyclus Neumann (Australian paralysis tick); Dermacentor variabilis Say (American dog tick); Amblyomma americanum Linnaeus (lone star tick) and scab and itch mites in the families Psoroptidae, Pyemotidae and Sarcoptidae.

[0038] Insect pests of the order Thysanura are of interest, such as Lepisma saccharina Linnaeus (silverfish); Thermobia domestica Packard (firebrat).

[0039] Insect pests of interest include the superfamily of stink bugs and other related insects including but not limited to species belonging to the family Pentatomidae (Nezara viridula, Halyomorpha halys, Piezodorus guildini, Euschistus servus, Acrosternum hilare, Euschistus heros, Euschistus tristigmus, Acrosternum hilare, Dichelops furcatus, Dichelops melacanthus, and Bagrada hilaris (Bagrada Bug)), the family Plataspidae (Megacopta cribraria—Bean plataspid) and the family Cydnidae (Scaptocoris castanea—Root stink bug) and Lepidoptera species including but not limited to: diamond-back moth, e.g., Helicoverpa zea Boddie; soybean looper, e.g., Pseudoplusia includens Walker and velvet bean caterpillar e.g., Anticarsia gemmatalis Hübner.

### II. Target Sequences

[0040] As used herein, a “target sequence” or “target polynucleotide” comprises any sequence in the pest that one desires to reduce the level of expression thereof. In certain embodiments, decreasing the level of expression of the target sequence in the pest controls the pest. For instance, the target sequence may be essential for growth and development. Alternatively, a target sequence may be essential for fecundity. Non-limiting examples of target sequences include a polynucleotide set forth in SEQ ID NOS.: 1-398, or variants and fragments thereof, and complements thereof. As exemplified elsewhere herein, decreasing the level of expression of one or more of these target sequences in a Coleopteran plant pest or a Diabrotica plant pest controls the pest.

### III. Silencing Elements

[0041] By “silencing element” is intended a polynucleotide which when contacted by or ingested by a plant insect pest, is capable of reducing or eliminating the level or expression of a target polynucleotide or the polypeptide encoded thereby. Accordingly, it is to be understood that “silencing element,” as used herein, comprises polynucleotides such as RNA constructs, double stranded RNA (dsRNA), hairpin RNA, siRNA, miRNA, amiRNA, and sense and/or antisense RNA. In one embodiment, the silencing element employed can reduce or eliminate the expression level of the target sequence by influencing the level of the target RNA transcript or, alternatively, by influencing translation and thereby affecting the level of the encoded polypeptide. Methods to assay for functional silencing elements that are capable of reducing or eliminating the level of a sequence of interest are disclosed elsewhere herein. A single polynucleotide employed in the disclosed methods can comprise one or more silencing elements to the same or different target polynucleotides. The silencing element can be produced in vivo (i.e., in a host cell such as a plant or microorganism) or in vitro.

[0042] In certain embodiments, a silencing element may comprise a chimeric construction molecule comprising two or more disclosed sequences or portions thereof. For example, the chimeric construction may be a hairpin or dsRNA as disclosed herein. A chimera may comprise two or more disclosed sequences or portions thereof. In one embodiment, a chimera contemplates two complementary sequences set forth herein, or portions thereof, having some degree of mismatch between the complementary sequences such that the two sequences are not perfect complements of one another. Providing at least two different sequences in a single silencing element may allow for targeting multiple genes using one silencing element and/or for example, one expression cassette. Targeting multiple genes may allow for slowing or reducing the possibility of resistance by the pest. In addition, providing multiple targeting ability in one expressed molecule may reduce the expression burden of the transformed plant or plant product, or provide topical treatments that are capable of targeting multiple hosts with one application.

[0043] In certain embodiments, while the silencing element controls pests, preferably the silencing element has no effect on the normal plant or plant part.

[0044] As discussed in further detail below, silencing elements can include, but are not limited to, a sense suppression element, an antisense suppression element, a double stranded RNA, a siRNA, an amiRNA, a miRNA, or a hairpin suppression element. In an embodiment, silencing elements may comprise a chimera where two or more disclosed sequences or active fragments or variants, or complements thereof, are found in the silencing element. In various embodiments, a disclosed sequence or active fragment or variant, or complement thereof, may be present as more than one copy in a DNA construct, silencing element, DNA molecule or RNA molecule. In a hairpin or dsRNA molecule, the location of a sense or antisense sequence in the molecule, for example, in which sequence is transcribed first or is located on a particular terminus of the RNA molecule, is not limiting to the disclosed sequences, and the dsRNA is not to be limited by disclosures herein of a particular location for such a sequence. Non-limiting examples of silencing elements that can be employed to decrease expression of these target sequences comprise fragments or variants of the sense or antisense sequence, or alternatively consists of the sense or antisense sequence, of a sequence set forth in SEQ ID NOS.: 1-398, or variants and fragments thereof, and complements thereof. The silencing element can further comprise additional sequences that advantageously effect transcription and/or the stability of a resulting transcript. For example, the silencing elements can comprise at least one thymine residue at the 3′ end. This can aid in stabilization. Thus, the silencing elements can have at least 1, 2, 3, 4, 5, 6, 7, 8, 9, 10 or more thymine residues at the 3′ end. As discussed in further detail below, enhancer suppressor elements can also be employed in conjunction with the silencing elements disclosed herein.

[0045] By “reduces” or “reducing” the expression level of a polynucleotide or a polypeptide encoded thereby is intended to mean, the polynucleotide or polypeptide level of the target sequence is statistically lower than the polynucleotide level or polypeptide level of the same target sequence in an appropriate control pest which is not exposed to (i.e., has not ingested or come into contact with) the silencing element. In particular embodiments, methods and/or compositions disclosed herein reduce the polynucleotide level and/or the polypeptide level of the target sequence in a plant insect pest to less than 95%, less than 90%, less than 80%, less than 70%, less than 60%, less than 50%, less than 40%, less than 30%, less than 20%, less than 10%, or less than 5% of the polynucleotide level, or the level of the polypeptide encoded thereby, of the same target sequence in an appropriate control pest. In some embodiments, a silencing element has substantial sequence identity to the target polynucleotide, typically greater than about 65% sequence identity, greater than about 85% sequence identity, about 90%, 91%, 92%, 93%, 94%, 95%, 96%, 97%, 98% or 99% sequence identity. Furthermore, a silencing element can be complementary to a portion of the target polynucleotide. Generally, target sequences of at least 15, 16, 17, 18, 19, 20, 21, 22, 23, 24, 25, 50, 100, 200, 300, 400, 450 continuous nucleotides or greater of the sequence set forth in any of SEQ ID NOS.: 1-398, or variants and fragments thereof, and complements thereof may be used. Methods to assay for the level of the RNA transcript, the level of the encoded polypeptide, or the activity of the polynucleotide or polypeptide are discussed elsewhere herein.

[0046] i. Sense Suppression Elements

[0047] As used herein, a “sense suppression element” comprises a polynucleotide designed to express an RNA molecule corresponding to at least a part of a target messenger RNA in the “sense” orientation.

[0048] Expression of the RNA molecule comprising the sense suppression element reduces or eliminates the level of the target polynucleotide or the polypeptide encoded thereby. The polynucleotide comprising the sense suppression element may correspond to all or part of the sequence of the target polynucleotide, all or part of the 5′ and/or 3′ untranslated region of the target polynucleotide, all or part of the coding sequence of the target polynucleotide, or all or part of both the coding sequence and the untranslated regions of the target polynucleotide.

[0049] Typically, a sense suppression element has substantial sequence identity to the target polynucleotide, typically greater than about 65% sequence identity, greater than about 85% sequence identity, about 90%, 91%, 92%, 93%, 94%, 95%, 96%, 97%, 98% or 99% sequence identity. See, U.S. Pat. Nos. 5,283,184 and 5,034,323. The sense suppression element can be any length so long as it allows for the suppression of the targeted sequence. The sense suppression element can be, for example, 15, 16, 17, 18, 19, 20, 22, 25, 30, 50, 100, 150, 200, 250, 300, 350, 400, 450, 500, 600, 700, 900, 1000, 1100, 1200, 1300 nucleotides or longer of the target polynucleotides set forth in any of SEQ ID NOS.: 1-398, or variants and fragments thereof, and complements thereof. In other embodiments, the sense suppression element can be, for example, about 15-25, 19-35, 19-50, 25-100, 100-150, 150-200, 200-250, 250-300, 300-350, 350-400, 450-500, 500-550, 550-600, 600-650, 650-700, 700-750, 750-800, 800-850, 850-900, 900-950, 950-1000, 1000-1050, 1050-1100, 1100-1200, 1200-1300, 1300-1400, 1400-1500, 1500-1600, 1600-1700, 1700-1800 nucleotides or longer of the target polynucleotides set forth in any of SEQ ID NOS.: 1-398, or variants and fragments thereof, and complements thereof.

[0050] ii. Antisense Suppression Elements

[0051] As used herein, an “antisense suppression element” comprises a polynucleotide which is designed to express an RNA molecule complementary to all or part of a target messenger RNA.

[0052] Expression of the antisense RNA suppression element reduces or eliminates the level of the target polynucleotide. The polynucleotide for use in antisense suppression may correspond to all or part of the complement of the sequence encoding the target polynucleotide, all or part of the complement of the 5′ and/or 3′ untranslated region of the target polynucleotide, all or part of the complement of the coding sequence of the target polynucleotide, or all or part of the complement of both the coding sequence and the untranslated regions of the target polynucleotide. In addition, the antisense suppression element may be fully complementary (i.e., 100% identical to the complement of the target sequence) or partially complementary (i.e., less than 100% identical to the complement of the target sequence) to the target polynucleotide. In certain embodiments, the antisense suppression element comprises at least 85%, 90%, 91%, 92%, 93%, 94%, 95%, 96%, 97%, 98%, or 99% sequence complementarity to the target polynucleotide. Antisense suppression may be used to inhibit the expression of multiple proteins in the same plant. See, for example, U.S. Pat. No. 5,942,657. Furthermore, the antisense suppression element can be complementary to a portion of the target polynucleotide. Generally, sequences of at least 15, 16, 17, 18, 19, 20, 21, 22, 23, 24, 25, 50, 100, 200, 300, 400, 450 nucleotides or greater of the sequence set forth in any of SEQ ID NOS.: 1-398, or variants and fragments thereof, and complements thereof may be used. Methods for using antisense suppression to inhibit the expression of endogenous genes in plants are described, for example, in Liu et al (2002) Plant Physiol. 129:1732-1743 and U.S. Pat. No. 5,942,657.

[0053] iii. Double Stranded RNA Suppression Element

[0054] A “double stranded RNA silencing element” or “dsRNA,” comprises at least one transcript that is capable of forming a dsRNA either before or after ingestion by a plant insect pest. Thus, a “dsRNA silencing element” includes a dsRNA, a transcript or polyribonucleotide capable of forming a dsRNA or more than one transcript or polyribonucleotide capable of forming a dsRNA. “Double stranded RNA” or “dsRNA” refers to a polyribonucleotide structure formed either by a single self-complementary RNA molecule or a polyribonucleotide structure formed by the expression of at least two distinct RNA strands. The dsRNA molecule(s) employed in the disclosed methods and compositions mediate the reduction of expression of a target sequence, for example, by mediating RNA interference “RNAi” or gene silencing in a sequence-specific manner. In various embodiments, the dsRNA is capable of reducing or eliminating the level or expression of a target polynucleotide or the polypeptide encoded thereby in a plant insect pest.

[0055] The dsRNA can reduce or eliminate the expression level of the target sequence by influencing the level of the target RNA transcript, by influencing translation and thereby affecting the level of the encoded polypeptide, or by influencing expression at the pre-transcriptional level (i.e., via the modulation of chromatin structure, methylation pattern, etc., to alter gene expression). For example, see Verdel et al. (2004) Science 303:672-676; Pal-Bhadra et al. (2004) Science 303:669-672; Allshire (2002) Science 297:1818-1819; Volpe et al. (2002) Science 297:1833-1837; Jenuwein (2002) Science 297:2215-2218; and Hall et al. (2002) Science 297:2232-2237. Methods to assay for functional dsRNA that are capable of reducing or eliminating the level of a sequence of interest are disclosed elsewhere herein. Accordingly, as used herein, the term “dsRNA” is meant to encompass other terms used to describe nucleic acid molecules that are capable of mediating RNA interference or gene silencing, including, for example, short-interfering RNA (siRNA), double-stranded RNA (dsRNA), micro-RNA (miRNA), hairpin RNA, short hairpin RNA (shRNA), post-transcriptional gene silencing RNA (ptgsRNA), and others.

[0056] In certain embodiments, at least one strand of the duplex or double-stranded region of the dsRNA shares sufficient sequence identity or sequence complementarity to the target polynucleotide to allow the dsRNA to reduce the level of expression of the target sequence. In some embodiments, a dsRNA has substantial sequence identity to the target polynucleotide, typically greater than about 65% sequence identity, greater than about 85% sequence identity, about 90%, 91%, 92%, 93%, 94%, 95%, 96%, 97%, 98% or 99% sequence identity. Furthermore, a dsRNA element can be complementary to a portion of the target polynucleotide. Generally, sequences of at least 15, 16, 17, 18, 19, 20, 21, 22, 23, 24, 25, 50, 100, 200, 300, 400, 450 nucleotides or greater of the sequence set forth in any of SEQ ID NOS.: 1-398, or variants and fragments thereof, and complements thereof may be used. As used herein, the strand that is complementary to the target polynucleotide is the “antisense strand” and the strand homologous to the target polynucleotide is the “sense strand.”

[0057] In another embodiment, the dsRNA comprises a hairpin RNA. A hairpin RNA comprises an RNA molecule that is capable of folding back onto itself to form a double stranded structure. Multiple structures can be employed as hairpin elements. In certain embodiments, the dsRNA silencing element comprises a hairpin element which comprises in the following order, a first segment, a second segment, and a third segment, where the first and the third segment share sufficient complementarity to allow the transcribed RNA to form a double-stranded stem-loop structure.

[0058] The “second segment” of the hairpin comprises a “loop” or a “loop region.” These terms are used synonymously herein and are to be construed broadly to comprise any nucleotide sequence that confers enough flexibility to allow self-pairing to occur between complementary regions of a polynucleotide (i.e., segments 1 and 3 which form the stem of the hairpin). For example, in some embodiments, the loop region may be substantially single stranded and act as a spacer between the self-complementary regions of the hairpin stem-loop. In some embodiments, the loop region can comprise a random or nonsense nucleotide sequence and thus not share sequence identity to a target polynucleotide. In other embodiments, the loop region comprises a sense or an antisense RNA sequence or fragment thereof that shares identity to a target polynucleotide. See, for example, International Patent Publication No. WO 02/00904. In certain embodiments, the loop sequence can include an intron sequence, a sequence derived from an intron sequence, a sequence homologous to an intron sequence, or a modified intron sequence. The intron sequence can be one found in the same or a different species from which segments 1 and 3 are derived. In certain embodiments, the loop region can be optimized to be as short as possible while still providing enough intramolecular flexibility to allow the formation of the base-paired stem region. Accordingly, the loop sequence is generally less than 1000, 900, 800, 700, 600, 500, 400, 300, 200, 100, 50, 25, 20, 19, 18, 17, 16, 15, 10 nucleotides or less.

[0059] The “first” and the “third” segment of the hairpin RNA molecule comprise the base-paired stem of the hairpin structure. The first and the third segments are inverted repeats of one another and share sufficient complementarity to allow the formation of the base-paired stem region. In certain embodiments, the first and the third segments are fully complementary to one another. Alternatively, the first and the third segment may be partially complementary to each other so long as they are capable of hybridizing to one another to form a base-paired stem region. The amount of complementarity between the first and the third segment can be calculated as a percentage of the entire segment. Thus, the first and the third segment of the hairpin RNA generally share at least 50%, 60%, 70%, 80%, 85%, 90%, 91%, 92%, 93%, 94%, 95%, 96%, 97%, 98%, 99%, up to and including 100% complementarity.

[0060] The first and the third segment are at least about 1000, 500, 475, 450, 425, 400, 375, 350, 325, 300, 250, 225, 200, 175, 150, 125, 100, 75, 60, 50, 40, 30, 25, 22, 21, 20, 19, 18, 17, 16, 15 or 10 nucleotides in length. In certain embodiments, the length of the first and/or the third segment is about 10-100 nucleotides, about 10 to about 75 nucleotides, about 10 to about 50 nucleotides, about 10 to about 40 nucleotides, about 10 to about 35 nucleotides, about 10 to about 30 nucleotides, about 10 to about 25 nucleotides, about 10 to about 19 nucleotides, about 10 to about 20 nucleotides, about 19 to about 50 nucleotides, about 50 nucleotides to about 100 nucleotides, about 100 nucleotides to about 150 nucleotides, about 100 nucleotides to about 300 nucleotides, about 150 nucleotides to about 200 nucleotides, about 200 nucleotides to about 250 nucleotides, about 250 nucleotides to about 300 nucleotides, about 300 nucleotides to about 350 nucleotides, about 350 nucleotides to about 400 nucleotides, about 400 nucleotide to about 500 nucleotides, about 600 nt, about 700 nt, about 800 nt, about 900 nt, about 1000 nt, about 1100 nt, about 1200 nt, 1300 nt, 1400 nt, 1500 nt, 1600 nt, 1700 nt, 1800 nt, 1900 nt, 2000 nt or longer. In other embodiments, the length of the first and/or the third segment comprises at least 10-19 nucleotides, 10-20 nucleotides; 19-35 nucleotides, 20-35 nucleotides; 30-45 nucleotides; 40-50 nucleotides; 50-100 nucleotides; 100-300 nucleotides; about 500-700 nucleotides; about 700-900 nucleotides; about 900-1100 nucleotides; about 1300-1500 nucleotides; about 1500-1700 nucleotides; about 1700-1900 nucleotides; about 1900-2100 nucleotides; about 2100-2300 nucleotides; or about 2300-2500 nucleotides. See, for example, International Publication No. WO 02/00904.

[0061] The disclosed hairpin molecules or double-stranded RNA molecules may have more than one disclosed sequence or active fragments or variants, or complements thereof, found in the same portion of the RNA molecule. For example, in a chimeric hairpin structure, the first segment of a hairpin molecule comprises two polynucleotide sections, each with a different disclosed sequence. For example, reading from one terminus of the hairpin, the first segment is composed of sequences from two separate genes (A followed by B). This first segment is followed by the second segment, the loop portion of the hairpin. The loop segment is followed by the third segment, where the complementary strands of the sequences in the first segment are found (B* followed by A*) in forming the stem-loop, hairpin structure, the stem contains SeqA-A* at the distal end of the stem and SeqB-B* proximal to the loop region.

[0062] In certain embodiments, the first and the third segment comprise at least 20 nucleotides having at least 85% complementarity to the first segment. In still other embodiments, the first and the third segments which form the stem-loop structure of the hairpin comprise 3′ or 5′ overhang regions having unpaired nucleotide residues.

[0063] In certain embodiments, the sequences used in the first, the second, and/or the third segments comprise domains that are designed to have sufficient sequence identity to a target polynucleotide of interest and thereby have the ability to decrease the level of expression of the target polynucleotide. The specificity of the inhibitory RNA transcripts is therefore generally conferred by these domains of the silencing element. Thus, in some embodiments, the first, second and/or third segment of the silencing element comprise a domain having at least 10, at least 15, at least 19, at least 20, at least 21, at least 22, at least 23, at least 24, at least 25, at least 30, at least 40, at least 50, at least 100, at least 200, at least 300, at least 500, at least 1000, or more than 1000 nucleotides that share sufficient sequence identity to the target polynucleotide to allow for a decrease in expression levels of the target polynucleotide when expressed in an appropriate cell. In other embodiments, the domain is between about 15 to 50 nucleotides, about 19-35 nucleotides, about 20-35 nucleotides, about 25-50 nucleotides, about 19 to 75 nucleotides, about 20 to 75 nucleotides, about 40-90 nucleotides about 15-100 nucleotides, 10-100 nucleotides, about 10 to about 75 nucleotides, about 10 to about 50 nucleotides, about 10 to about 40 nucleotides, about 10 to about 35 nucleotides, about 10 to about 30 nucleotides, about 10 to about 25 nucleotides, about 10 to about 20 nucleotides, about 10 to about 19 nucleotides, about 50 nucleotides to about 100 nucleotides, about 100 nucleotides to about 150 nucleotides, about 150 nucleotides to about 200 nucleotides, about 200 nucleotides to about 250 nucleotides, about 250 nucleotides to about 300 nucleotides, about 300 nucleotides to about 350 nucleotides, about 350 nucleotides to about 400 nucleotides, about 400 nucleotide to about 500 nucleotides or longer. In other embodiments, the length of the first and/or the third segment comprises at least 10-20 nucleotides, at least 10-19 nucleotides, 20-35 nucleotides, 30-45 nucleotides, 40-50 nucleotides, 50-100 nucleotides, or about 100-300 nucleotides.

[0064] In certain embodiments, a domain of the first, the second, and/or the third segment has 100% sequence identity to the target polynucleotide. In other embodiments, the domain of the first, the second and/or the third segment having homology to the target polynucleotide have at least 50%, 60%, 70%, 80%, 85%, 90%, 91%, 92%, 93%, 94%, 95%, 96%, 97%, 98%, 99%, or greater sequence identity to a region of the target polynucleotide. The sequence identity of the domains of the first, the second and/or the third segments complementary to a target polynucleotide need only be sufficient to decrease expression of the target polynucleotide of interest. See, for example, Chuang and Meyerowitz (2000) Proc. Natl. Acad. Sci. USA 97:4985-4990; Stoutjesdijk et al. (2002) Plant Physiol. 129:1723-1731; Waterhouse and Helliwell (2003) Nat. Rev. Genet. 4:29-38; Pandolfini et al. BMC Biotechnology 3:7, and U.S. Patent Publication No. 20030175965. A transient assay for the efficiency of hpRNA constructs to silence gene expression in vivo has been described by Panstruga et al. (2003) Mol. Biol. Rep. 30:135-140.

[0065] The amount of complementarity shared between the first, second, and/or third segment and the target polynucleotide or the amount of complementarity shared between the first segment and the third segment (i.e., the stem of the hairpin structure) may vary depending on the organism in which gene expression is to be controlled. Some organisms or cell types may require exact pairing or 100% identity, while other organisms or cell types may tolerate some mismatching. In some cells, for example, a single nucleotide mismatch in the targeting sequence abrogates the ability to suppress gene expression. In these cells, the disclosed suppression cassettes can be used to target the suppression of mutant genes, for example, oncogenes whose transcripts comprise point mutations and therefore they can be specifically targeted using the methods and compositions disclosed herein without altering the expression of the remaining wild-type allele. In other organisms, holistic sequence variability may be tolerated as long as some 22 nt region of the sequence is represented in 100% homology between target polynucleotide and the suppression cassette.

[0066] Any region of the target polynucleotide can be used to design a domain of the silencing element that shares sufficient sequence identity to allow expression of the hairpin transcript to decrease the level of the target polynucleotide. For instance, a domain may be designed to share sequence identity to the 5′ untranslated region of the target polynucleotide(s), the 3′ untranslated region of the target polynucleotide(s), exonic regions of the target polynucleotide(s), intronic regions of the target polynucleotide(s), and any combination thereof. In certain embodiments, a domain of the silencing element shares sufficient identity, homology, or is complementary to at least about 15, 16, 17, 18, 19, 20, 22, 25 or 30 consecutive nucleotides from about nucleotides 1-50, 25-75, 75-125, 50-100, 125-175, 175-225, 100-150, 150-200, 200-250, 225-275, 275-325, 250-300, 325-375, 375-425, 300-350, 350-400, 425-475, 400-450, 475-525, 450-500, 525-575, 575-625, 550-600, 625-675, 675-725, 600-650, 625-675, 675-725, 650-700, 725-825, 825-875, 750-800, 875-925, 925-975, 850-900, 925-975, 975-1025, 950-1000, 1000-1050, 1025-1075, 1075-1125, 1050-1100, 1125-1175, 1100-1200, 1175-1225, 1225-1275, 1200-1300, 1325-1375, 1375-1425, 1300-1400, 1425-1475, 1475-1525, 1400-1500, 1525-1575, 1575-1625, 1625-1675, 1675-1725, 1725-1775, 1775-1825, 1825-1875, 1875-1925, 1925-1975, 1975-2025, 2025-2075, 2075-2125, 2125-2175, 2175-2225, 1500-1600, 1600-1700, 1700-1800, 1800-1900, 1900-2000 of the target sequence. In some instances to optimize the siRNA sequences employed in the hairpin, the synthetic oligodeoxyribonucleotide/RNAse H method can be used to determine sites on the target mRNA that are in a conformation that is susceptible to RNA silencing. See, for example, Vickers et al. (2003) J. Biol. Chem 278:7108-7118 and Yang et al. (2002) Proc. Natl. Acad. Sci. USA 99:9442-9447. These studies indicate that there is a significant correlation between the RNase-H-sensitive sites and sites that promote efficient siRNA-directed mRNA degradation.

[0067] The hairpin silencing element may also be designed such that the sense sequence or the antisense sequence do not correspond to a target polynucleotide. In this embodiment, the sense and antisense sequence flank a loop sequence that comprises a nucleotide sequence corresponding to all or part of the target polynucleotide. Thus, it is the loop region that determines the specificity of the RNA interference. See, for example, WO 02/00904.

[0068] In addition, transcriptional gene silencing (TGS) may be accomplished through use of a hairpin silencing element where the inverted repeat of the hairpin shares sequence identity with the promoter region of a target polynucleotide to be silenced. See, for example, Aufsatz et al. (2002) PNAS 99 (Suppl. 4):16499-16506 and Mette et al. (2000) EMBO J 19(19):5194-5201.

[0069] In other embodiments, the silencing element can comprise a small RNA (sRNA). sRNAs can comprise both micro RNA (miRNA) and short-interfering RNA (siRNA) (Meister and Tuschl (2004) Nature 431:343-349 and Bonetta et al. (2004) Nature Methods 1:79-86). miRNAs are regulatory agents comprising about 19 to about 24 ribonucleotides in length which are highly efficient at inhibiting the expression of target polynucleotides. See, for example Javier et al. (2003) Nature 425: 257-263. For miRNA interference, the silencing element can be designed to express a dsRNA molecule that forms a hairpin structure or partially base-paired structure containing a 19, 20, 21, 22, 23, 24 or 25 nucleotide sequence that is complementary to the target polynucleotide of interest. The miRNA can be synthetically made, or transcribed as a longer RNA which is subsequently cleaved to produce the active miRNA. Specifically, the miRNA can comprise about 19 nucleotides of the sequence having homology to a target polynucleotide in sense orientation and about 19 nucleotides of a corresponding antisense sequence that is complementary to the sense sequence. The miRNA can be an “artificial miRNA” or “amiRNA” which comprises a miRNA sequence that is synthetically designed to silence a target sequence.

[0070] When expressing an miRNA the final (mature) miRNA is present in a duplex in a precursor backbone structure, the two strands being referred to as the miRNA (the strand that will eventually base pair with the target) and miRNA*(star sequence). It has been demonstrated that miRNAs can be transgenically expressed and target genes of interest for efficient silencing (Highly specific gene silencing by artificial microRNAs in Arabidopsis Schwab R, Ossowski S, Riester M, Warthmann N, Weigel D. Plant Cell. 2006 May; 18(5):1121-33. Epub 2006 Mar. 10; and Expression of artificial microRNAs in transgenic Arabidopsis thaliana confers virus resistance. Niu Q W, Lin S S, Reyes J L, Chen K C, Wu H W, Yeh S D, Chua N H. Nat Biotechnol. 2006 November; 24(11):1420-8. Epub 2006 Oct. 22. Erratum in: Nat Biotechnol. 2007 February; 25(2):254.).

[0071] The silencing element for miRNA interference comprises a miRNA primary sequence. The miRNA primary sequence comprises a DNA sequence having the miRNA and star sequences separated by a loop as well as additional sequences flanking this region that are important for processing. When expressed as an RNA, the structure of the primary miRNA is such as to allow for the formation of a hairpin RNA structure that can be processed into a mature miRNA. In some embodiments, the miRNA backbone comprises a genomic or cDNA miRNA precursor sequence, wherein said sequence comprises a native primary in which a heterologous (artificial) mature miRNA and star sequence are inserted.

[0072] As used herein, a “star sequence” is the sequence within a miRNA precursor backbone that is complementary to the miRNA and forms a duplex with the miRNA to form the stem structure of a hairpin RNA. In some embodiments, the star sequence can comprise less than 100% complementarity to the miRNA sequence. Alternatively, the star sequence can comprise at least 99%, 98%, 97%, 96%, 95%, 90%, 85%, 80% or lower sequence complementarity to the miRNA sequence as long as the star sequence has sufficient complementarity to the miRNA sequence to form a double stranded structure. In still further embodiments, the star sequence comprises a sequence having 1, 2, 3, 4, 5 or more mismatches with the miRNA sequence and still has sufficient complementarity to form a double stranded structure with the miRNA sequence resulting in production of miRNA and suppression of the target sequence.

[0073] The miRNA precursor backbones can be from any plant. In some embodiments, the miRNA precursor backbone is from a monocot. In other embodiments, the miRNA precursor backbone is from a dicot. In further embodiments, the backbone is from maize or soybean. MicroRNA precursor backbones have been described previously. For example, US20090155910A1 (WO 2009/079532) discloses the following soybean miRNA precursor backbones: 156c, 159, 166b, 168c, 396b and 398b, and US20090155909A1 (WO 2009/079548) discloses the following maize miRNA precursor backbones: 159c, 164h, 168a, 169r, and 396h.

[0074] Thus, the primary miRNA can be altered to allow for efficient insertion of heterologous miRNA and star sequences within the miRNA precursor backbone. In such instances, the miRNA segment and the star segment of the miRNA precursor backbone are replaced with the heterologous miRNA and the heterologous star sequences, designed to target any sequence of interest, using a PCR technique and cloned into an expression construct. It is recognized that there could be alterations to the position at which the artificial miRNA and star sequences are inserted into the backbone. Detailed methods for inserting the miRNA and star sequence into the miRNA precursor backbone are described in, for example, US Patent Applications 20090155909A1 and US20090155910A1.

[0075] When designing a miRNA sequence and star sequence, various design choices can be made. See, for example, Schwab R, et al. (2005) Dev Cell 8: 517-27. In non-limiting embodiments, the miRNA sequences disclosed herein can have a “U” at the 5′-end, a “C” or “G” at the 19th nucleotide position, and an “A” or “U” at the 10th nucleotide position. In other embodiments, the miRNA design is such that the miRNA have a high free delta-G as calculated using the ZipFold algorithm (Markham, N. R. & Zuker, M. (2005) Nucleic Acids Res. 33: W577-W581.) Optionally, a one base pair change can be added within the 5′ portion of the miRNA so that the sequence differs from the target sequence by one nucleotide.

[0076] The methods and compositions disclosed herein employ DNA constructs that when transcribed “form” a silencing element, such as a dsRNA molecule. The methods and compositions also may comprise a host cell comprising the DNA construct encoding a silencing element. In another embodiment, the methods and compositions also may comprise a transgenic plant comprising the DNA construct encoding a silencing element. Accordingly, the heterologous polynucleotide being expressed need not form the dsRNA by itself, but can interact with other sequences in the plant cell or in the pest gut after ingestion to allow the formation of the dsRNA. For example, a chimeric polynucleotide that can selectively silence the target polynucleotide can be generated by expressing a chimeric construct comprising the target sequence for a miRNA or siRNA to a sequence corresponding to all or part of the gene or genes to be silenced. In this embodiment, the dsRNA is “formed” when the target for the miRNA or siRNA interacts with the miRNA present in the cell. The resulting dsRNA can then reduce the level of expression of the gene or genes to be silenced. See, for example, US Application Publication 20070130653, entitled “Methods and Compositions for Gene Silencing”. The construct can be designed to have a target for an endogenous miRNA or alternatively, a target for a heterologous and/or synthetic miRNA can be employed in the construct. If a heterologous and/or synthetic miRNA is employed, it can be introduced into the cell on the same nucleotide construct as the chimeric polynucleotide or on a separate construct. As discussed elsewhere herein, any method can be used to introduce the construct comprising the heterologous miRNA.

### IV. Variants and Fragments

[0077] By “fragment” is intended a portion of the polynucleotide or a portion of the amino acid sequence and hence protein encoded thereby. Fragments of a polynucleotide may encode protein fragments that retain the biological activity of the native protein. Alternatively, fragments of a polynucleotide that are useful as a silencing element do not need to encode fragment proteins that retain biological activity. Thus, fragments of a nucleotide sequence may range from at least about 10, about 15, about 16, about 17, about 18, about 19, nucleotides, about 20 nucleotides, about 21 nucleotides, about 22 nucleotides, about 50 nucleotides, about 75 nucleotides, about 100 nucleotides, 200 nucleotides, 300 nucleotides, 400 nucleotides, 500 nucleotides, 600 nucleotides, 700 nucleotides and up to and including one nucleotide less than the full-length polynucleotide employed. Alternatively, fragments of a nucleotide sequence may range from 1-50, 25-75, 75-125, 50-100, 125-175, 175-225, 100-150, 100-300, 150-200, 200-250, 225-275, 275-325, 250-300, 325-375, 375-425, 300-350, 350-400, 425-475, 400-450, 475-525, 450-500, 525-575, 575-625, 550-600, 625-675, 675-725, 600-650, 625-675, 675-725, 650-700, 725-825, 825-875, 750-800, 875-925, 925-975, 850-900, 925-975, 975-1025, 950-1000, 1000-1050, 1025-1075, 1075-1125, 1050-1100, 1125-1175, 1100-1200, 1175-1225, 1225-1275, 1200-1300, 1325-1375, 1375-1425, 1300-1400, 1425-1475, 1475-1525, 1400-1500, 1525-1575, 1575-1625, 1625-1675, 1675-1725, 1725-1775, 1775-1825, 1825-1875, 1875-1925, 1925-1975, 1975-2025, 2025-2075, 2075-2125, 2125-2175, 2175-2225, 1500-1600, 1600-1700, 1700-1800, 1800-1900, 1900-2000 of any one of SEQ ID NOS.: 1-398, or variants and fragments thereof, and complements thereof. Methods to assay for the activity of a desired silencing element are described elsewhere herein.

[0078] “Variants” is intended to mean substantially similar sequences. For polynucleotides, a variant comprises a deletion and/or addition of one or more nucleotides at one or more internal sites within the native polynucleotide and/or a substitution of one or more nucleotides at one or more sites in the native polynucleotide. A variant of a polynucleotide that is useful as a silencing element will retain the ability to reduce expression of the target polynucleotide and, in some embodiments, thereby control a plant insect pest of interest. As used herein, a “native” polynucleotide or polypeptide comprises a naturally occurring nucleotide sequence or amino acid sequence, respectively. For polynucleotides, conservative variants include those sequences that, because of the degeneracy of the genetic code, encode the amino acid sequence of one of the disclosed polypeptides. Variant polynucleotides also include synthetically derived polynucleotides, such as those generated, for example, by using site-directed mutagenesis, but continue to retain the desired activity. Generally, variants of a particular disclosed polynucleotide (i.e., a silencing element) will have at least about 40%, 45%, 50%, 55%, 60%, 65%, 70%, 75%, 80%, 85%, 90%, 91%, 92%, 93%, 94%, 95%, 96%, 97%, 98%, 99% or more sequence identity to that particular polynucleotide as determined by sequence alignment programs and parameters described elsewhere herein.

[0079] Variants of a particular disclosed polynucleotide (i.e., the reference polynucleotide) can also be evaluated by comparison of the percent sequence identity between the polypeptide encoded by a variant polynucleotide and the polypeptide encoded by the reference polynucleotide. Where any given pair of disclosed polynucleotides employed is evaluated by comparison of the percent sequence identity shared by the two polypeptides they encode, the percent sequence identity between the two encoded polypeptides is at least about 40%, 45%, 50%, 55%, 60%, 65%, 70%, 75%, 80%, 85%, 90%, 91%, 92%, 93%, 94%, 95%, 96%, 97%, 98%, 99% or more sequence identity.

[0080] “Percent (%) sequence identity” with respect to a reference sequence (subject) is determined as the percentage of amino acid residues or nucleotides in a candidate sequence (query) that are identical with the respective amino acid residues or nucleotides in the reference sequence, after aligning the sequences and introducing gaps, if necessary, to achieve the maximum percent sequence identity, and not considering any amino acid conservative substitutions as part of the sequence identity. Alignment for purposes of determining percent sequence identity can be achieved in various ways that are within the skill in the art, for instance, using publicly available computer software such as BLAST, BLAST-2. Those skilled in the art can determine appropriate parameters for aligning sequences, including any algorithms needed to achieve maximal alignment over the full length of the sequences being compared. The percent identity between the two sequences is a function of the number of identical positions shared by the sequences (e.g., percent identity of query sequence=number of identical positions between query and subject sequences/total number of positions of query sequence×100).

[0081] A method is further provided for identifying a silencing element from the target polynucleotides set forth in SEQ ID NOS.: 1-398, or variants and fragments thereof, and complements thereof. Such methods comprise obtaining a candidate fragment of any one of SEQ ID NOS.: 1-398, or variants and fragments thereof, and complements thereof, which is of sufficient length to act as a silencing element and thereby reduce the expression of the target polynucleotide and/or control a desired pest; expressing said candidate polynucleotide fragment in an appropriate expression cassette to produce a candidate silencing element and determining if said candidate polynucleotide fragment has the activity of a silencing element and thereby reduce the expression of the target polynucleotide and/or controls a desired pest. Methods of identifying such candidate fragments based on the desired pathway for suppression, in light of the teachings provided herein, are known. For example, various bioinformatics programs can be employed to identify the region of the target polynucleotides that could be exploited to generate a silencing element. See, for example, Elbahir et al. (2001) Genes and Development 15:188-200, Schwartz et al. (2003) Cell 115:199-208, Khvorova et al. (2003) Cell 115:209-216. See also, siRNA at Whitehead (jura.wi.mit.edu/bioc/siRNAext/) which calculates the binding energies for both sense and antisense siRNAs. See, also genscript.com/ssl-bin/app/rnai?op=known; Block-iT™ RNAi designer from Invitrogen and GenScript siRNA Construct Builder. In various aspects, it is to be understand that the term “ . . . SEQ ID NOS.: 1-398, or variants or fragments thereof, or complements thereof . . . ” is intended to mean that the disclosed sequences comprise SEQ ID NOS.: 1-398, and/or fragments of SEQ ID NOS.: 1-398, and/or variants of SEQ ID NOS.: 1-398, and/or the complements of SEQ ID NOS.: 1-398, the variants of SEQ ID NOS.: 1-398, and/or the fragments of SEQ ID NOS.: 1-398, individually (or) or inclusive of some or all listed sequences.

### V. DNA Constructs

[0082] The use of the term “polynucleotide” is not intended to be limiting to polynucleotides comprising DNA. Those of ordinary skill in the art will recognize that polynucleotides can comprise ribonucleotides and combinations of ribonucleotides and deoxyribonucleotides. Such deoxyribonucleotides and ribonucleotides include both naturally occurring molecules and synthetic analogues. The disclosed polynucleotides also encompass all forms of sequences including, but not limited to, single-stranded forms, double-stranded forms, hairpins, stem-and-loop structures, and the like.

[0083] The polynucleotide encoding the silencing element or in certain embodiments employed in the disclosed methods and compositions can be provided in expression cassettes for expression in a plant or organism of interest. It is recognized that multiple silencing elements including multiple identical silencing elements, multiple silencing elements targeting different regions of the target sequence, or multiple silencing elements from different target sequences can be used. In this embodiment, it is recognized that each silencing element may be encoded by a single or separate cassette, DNA construct, or vector. As discussed, any means of providing the silencing element is contemplated. A plant or plant cell can be transformed with a single cassette comprising DNA encoding one or more silencing elements or separate cassettes encoding a silencing element can be used to transform a plant or plant cell or host cell. Likewise, a plant transformed with one component can be subsequently transformed with the second component. One or more DNA constructs encoding silencing elements can also be brought together by sexual crossing. That is, a first plant comprising one component is crossed with a second plant comprising the second component. Progeny plants from the cross will comprise both components.

[0084] The expression cassette can include 5′ and 3′ regulatory sequences operably linked to the polynucleotide of the invention. “Operably linked” is intended to mean a functional linkage between two or more elements. For example, an operable linkage between a polynucleotide of the invention and a regulatory sequence (i.e., a promoter) is a functional link that allows for expression of the polynucleotide disclosed herein. Operably linked elements may be contiguous or non-contiguous.

[0085] When used to refer to the joining of two protein coding regions, by operably linked is intended that the coding regions are in the same reading frame. The cassette may additionally contain at least one additional polynucleotide to be cotransformed into the organism. Alternatively, the additional polypeptide(s) can be provided on multiple expression cassettes. Expression cassettes can be provided with a plurality of restriction sites and/or recombination sites for insertion of the polynucleotide to be under the transcriptional regulation of the regulatory regions. The expression cassette may additionally contain selectable marker genes.

[0086] The expression cassette can include in the 5′-3′ direction of transcription, a transcriptional and translational initiation region (i.e., a promoter), a polynucleotide encoding the silencing element employed in the methods and compositions of the invention, and a transcriptional and translational termination region (i.e., termination region) functional in plants. In other embodiment, the double stranded RNA is expressed from a suppression cassette. Such a cassette can comprise two convergent promoters that drive transcription of an operably linked silencing element. “Convergent promoters” refers to promoters that are oriented on either terminus of the operably linked polynucleotide encoding the silencing element such that each promoter drives transcription of the silencing element in opposite directions, yielding two transcripts. In such embodiments, the convergent promoters allow for the transcription of the sense and anti-sense strand and thus allow for the formation of a dsRNA. Such a cassette may also comprise two divergent promoters that drive transcription of one or more operably linked polynucleotides encoding the silencing elements. “Divergent promoters” refers to promoters that are oriented in opposite directions of each other, driving transcription of the one or more polynucleotides encoding the silencing elements in opposite directions. In such embodiments, the divergent promoters allow for the transcription of the sense and antisense strands and allow for the formation of a dsRNA. In such embodiments, the divergent promoters also allow for the transcription of at least two separate hairpin RNAs. In another embodiment, one cassette comprising two or more polynucleotides encoding the silencing elements under the control of two separate promoters in the same orientation is present in a construct. In another embodiment, two or more individual cassettes, each comprising at least one polynucleotide encoding the silencing element under the control of a promoter, are present in a construct in the same orientation.

[0087] The regulatory regions (i.e., promoters, transcriptional regulatory regions, and translational termination regions) and/or the polynucleotides disclosed herein may be native/analogous to the host cell or to each other. Alternatively, the regulatory regions and/or the polynucleotide disclosed herein may be heterologous to the host cell or to each other. As used herein, “heterologous” in reference to a sequence is a sequence that originates from a foreign species, or, if from the same species, is substantially modified from its native form in composition and/or genomic locus by deliberate human intervention. For example, a promoter operably linked to a heterologous polynucleotide is from a species different from the species from which the polynucleotide was derived, or, if from the same/analogous species, one or both are substantially modified from their original form and/or genomic locus, or the promoter is not the native promoter for the operably linked polynucleotide. As used herein, a chimeric gene comprises a coding sequence operably linked to a transcription initiation region that is heterologous to the coding sequence.

[0088] The termination region may be native with the transcriptional initiation region, may be native with the operably linked polynucleotide encoding the silencing element, may be native with the plant host, or may be derived from another source (i.e., foreign or heterologous) to the promoter, the polynucleotide encoding the silencing element, the plant host, or any combination thereof. Convenient termination regions are available from the Ti-plasmid of A. tumefaciens, such as the octopine synthase and nopaline synthase termination regions. See also Guerineau et al. (1991) Mol. Gen. Genet. 262:141-144; Proudfoot (1991) Cell 64:671-674; Sanfacon et al. (1991) Genes Dev. 5:141-149; Mogen et al. (1990) Plant Cell 2:1261-1272; Munroe et al. (1990) Gene 91:151-158; Ballas et al. (1989) Nucleic Acids Res. 17:7891-7903; and Joshi et al. (1987) Nucleic Acids Res. 15:9627-9639.

[0089] Additional sequence modifications are known to enhance gene expression in a cellular host. These include elimination of sequences encoding spurious polyadenylation signals, exon-intron splice site signals, transposon-like repeats, and other such well-characterized sequences that may be deleterious to gene expression. The G-C content of the sequence may be adjusted to levels average for a given cellular host, as calculated by reference to known genes expressed in the host cell. When possible, the sequence is modified to avoid predicted hairpin secondary mRNA structures.

[0090] In preparing the expression cassette, the various DNA fragments may be manipulated, so as to provide for the DNA sequences in the proper orientation and, as appropriate, in the proper reading frame. Toward this end, adapters or linkers may be employed to join the DNA fragments or other manipulations may be involved to provide for convenient restriction sites, removal of superfluous DNA, removal of restriction sites, or the like. For this purpose, in vitro mutagenesis, primer repair, restriction, annealing, resubstitutions, e.g., transitions and transversions, may be involved.

[0091] A number of promoters may be used with the compositions and methods disclosed herein. The promoters may be selected based on the desired outcome. The nucleic acids may be combined with constitutive, tissue-preferred, inducible, or other promoters for expression in the host organism.

[0092] Such constitutive promoters include, for example, the core promoter of the Rsyn7 promoter and other constitutive promoters disclosed in WO 99/43838 and U.S. Pat. No. 6,072,050; the core CaMV 35S promoter (Odell et al. (1985) Nature 313:810-812); rice actin (McElroy et al. (1990) Plant Cell 2:163-171); ubiquitin (Christensen et al. (1989) Plant Mol. Biol. 12:619-632 and Christensen et al. (1992) Plant Mol. Biol. 18:675-689); pEMU (Last et al. (1991) Theor. Appl. Genet. 81:581-588); MAS (Velten et al. (1984) EMBO J. 3:2723-2730); ALS promoter (U.S. Pat. No. 5,659,026), and the like. Other constitutive promoters include, for example, U.S. Pat. Nos. 5,608,149; 5,608,144; 5,604,121; 5,569,597; 5,466,785; 5,399,680; 5,268,463; 5,608,142; and 6,177,611.

[0093] Depending on the desired outcome, it may be beneficial to express the gene from an inducible promoter. An inducible promoter, for instance, a pathogen-inducible promoter could also be employed.

[0094] Such promoters include those from pathogenesis-related proteins (PR proteins), which are induced following infection by a pathogen; e.g., PR proteins, SAR proteins, beta-1,3-glucanase, chitinase, etc. See, for example, Redolfi et al. (1983) Neth. J. Plant Pathol. 89:245-254; Uknes et al. (1992) Plant Cell 4:645-656; and Van Loon (1985) Plant Mol. Virol. 4:111-116. See also WO 99/43819.

[0095] Additionally, as pathogens find entry into plants through wounds or insect damage, a wound-inducible promoter may be used in the constructions of the invention. Such wound-inducible promoters include potato proteinase inhibitor (pin II) gene (Ryan (1990) Ann. Rev. Phytopath. 28:425-449; Duan et al. (1996) Nature Biotechnology 14:494-498); wun1 and wun2, U.S. Pat. No. 5,428,148; win1 and win2 (Stanford et al. (1989) Mol. Gen. Genet. 215:200-208); systemin (McGurl et al. (1992) Science 225:1570-1573); WIP1 (Rohmeier et al. (1993) Plant Mol. Biol. 22:783-792; Eckelkamp et al. (1993) FEBS Letters 323:73-76); MPI gene (Corderok et al. (1994) Plant J. 6(2):141-150); and the like.

[0096] Additionally, pathogen-inducible promoters may be employed in the methods and nucleotide constructs of the embodiments. Such pathogen-inducible promoters include those from pathogenesis-related proteins (PR proteins), which are induced following infection by a pathogen; e.g., PR proteins, SAR proteins, beta-1,3-glucanase, chitinase, etc. See, for example, Redolfi et al. (1983) Neth. J. Plant Pathol. 89: 245-254; Uknes et al. (1992) Plant Cell 4: 645-656; and Van Loon (1985) Plant Mol. Virol. 4: 111-116. See also WO 99/43819.

[0097] Of interest are promoters that are expressed locally at or near the site of pathogen infection. See, for example, Marineau et al. (1987) Plant Mol. Biol. 9:335-342; Matton et al. (1989) Molecular Plant-Microbe Interactions 2:325-331; Somsisch et al. (1986) Proc. Natl. Acad. Sci. USA 83:2427-2430; Somsisch et al. (1988) Mol. Gen. Genet. 2:93-98; and Yang (1996) Proc. Natl. Acad. Sci. USA 93:14972-14977. See also, Chen et al. (1996) Plant J. 10:955-966; Zhang et al. (1994) Proc. Natl. Acad. Sci. USA 91:2507-2511; Warner et al. (1993) Plant J. 3:191-201; Siebertz et al. (1989) Plant Cell 1:961-968; U.S. Pat. No. 5,750,386 (nematode-inducible). Of particular interest is the inducible promoter for the maize PRms gene, whose expression is induced by the pathogen Fusarium moniliforme (see, for example, Cordero et al. (1992) Physiol. Mol. Plant Path. 41:189-200).

[0098] Chemical-regulated promoters can be used to modulate the expression of a gene in a plant through the application of an exogenous chemical regulator. Depending upon the objective, the promoter may be a chemical-inducible promoter, where application of the chemical induces gene expression, or a chemical-repressible promoter, where application of the chemical represses gene expression. Chemical-inducible promoters are known in the art and include, but are not limited to, the maize In2-2 promoter, which is activated by benzenesulfonamide herbicide safeners, the maize GST promoter, which is activated by hydrophobic electrophilic compounds that are used as pre-emergent herbicides, and the tobacco PR-1a promoter, which is activated by salicylic acid. Other chemical-regulated promoters of interest include steroid-responsive promoters (see, for example, the glucocorticoid-inducible promoter in Schena et al. (1991) Proc. Natl. Acad. Sci. USA 88:10421-10425 and McNellis et al. (1998) Plant J. 14(2):247-257) and tetracycline-inducible and tetracycline-repressible promoters (see, for example, Gatz et al. (1991) Mol. Gen. Genet. 227:229-237, and U.S. Pat. Nos. 5,814,618 and 5,789,156).

[0099] Tissue-preferred promoters can be utilized to target enhanced expression within a particular plant tissue. Tissue-preferred promoters include Yamamoto et al. (1997) Plant J. 12(2):255-265; Kawamata et al. (1997) Plant Cell Physiol. 38(7):792-803; Hansen et al. (1997) Mol. Gen Genet. 254(3):337-343; Russell et al. (1997) Transgenic Res. 6(2):157-168; Rinehart et al. (1996) Plant Physiol. 112(3):1331-1341; Van Camp et al. (1996) Plant Physiol. 112(2):525-535; Canevascini et al. (1996) Plant Physiol. 112(2):513-524; Yamamoto et al. (1994) Plant Cell Physiol. 35(5):773-778; Lam (1994) Results Probl. Cell Differ. 20:181-196; Orozco et al. (1993) Plant Mol Biol. 23(6): 1129-1138; Matsuoka et al. (1993) Proc Natl. Acad. Sci. USA 90(20):9586-9590; and Guevara-Garcia et al. (1993) Plant J. 4(3):495-505. Such promoters can be modified, if necessary, for weak expression.

[0100] Leaf-preferred promoters are known in the art. See, for example, Yamamoto et al. (1997) Plant J. 12(2):255-265; Kwon et al. (1994) Plant Physiol. 105:357-67; Yamamoto et al. (1994) Plant Cell Physiol. 35(5):773-778; Gotor et al. (1993) Plant J. 3:509-18; Orozco et al. (1993) Plant Mol. Biol. 23(6):1129-1138; and Matsuoka et al. (1993) Proc. Natl. Acad. Sci. USA 90(20):9586-9590.

[0101] Root-preferred promoters are known and can be selected from the many available from the literature or isolated de novo from various compatible species. See, for example, Hire et al. (1992) Plant Mol. Biol. 20(2):207-218 (soybean root-specific glutamine synthetase gene); Keller and Baumgartner (1991) Plant Cell 3(10):1051-1061 (root-specific control element in the GRP 1.8 gene of French bean); Sanger et al. (1990) Plant Mol. Biol. 14(3):433-443 (root-specific promoter of the mannopine synthase (MAS) gene of Agrobacterium tumefaciens); and Miao et al. (1991) Plant Cell 3(1):11-22 (full-length cDNA clone encoding cytosolic glutamine synthetase (GS), which is expressed in roots and root nodules of soybean). See also Bogusz et al. (1990) Plant Cell 2(7):633-641, where two root-specific promoters isolated from hemoglobin genes from the nitrogen-fixing nonlegume Parasponia andersonii and the related non-nitrogen-fixing nonlegume Trema tomentosa are described. The promoters of these genes were linked to a β-glucuronidase reporter gene and introduced into both the nonlegume Nicotiana tabacum and the legume Lotus corniculatus, and in both instances root-specific promoter activity was preserved. Leach and Aoyagi (1991) describe their analysis of the promoters of the highly expressed rolC and rolD root-inducing genes of Agrobacterium rhizogenes (see Plant Science (Limerick) 79(1):69-76). They concluded that enhancer and tissue-preferred DNA determinants are dissociated in those promoters. Teen et al. (1989) used gene fusion to lacZ to show that the Agrobacterium T-DNA gene encoding octopine synthase is especially active in the epidermis of the root tip and that the TR2′ gene is root specific in the intact plant and stimulated by wounding in leaf tissue, an especially desirable combination of characteristics for use with an insecticidal or larvicidal gene (see EMBO J. 8(2):343-350). The TR1′ gene, fused to nptII (neomycin phosphotransferase II) showed similar characteristics. Additional root-preferred promoters include the VfENOD-GRP3 gene promoter (Kuster et al. (1995) Plant Mol. Biol. 29(4):759-772); and rolB promoter (Capana et al. (1994) Plant Mol. Biol. 25(4):681-691. See also U.S. Pat. Nos. 5,837,876; 5,750,386; 5,633,363; 5,459,252; 5,401,836; 5,110,732; and 5,023,179.

[0102] Seed-preferred” promoters include both “seed-specific” promoters (those promoters active during seed development such as promoters of seed storage proteins) as well as “seed-germinating” promoters (those promoters active during seed germination). See Thompson et al. (1989) BioEssays 10:108. Such seed-preferred promoters include, but are not limited to, Cim1 (cytokinin-induced message); cZ19B1 (maize 19 kDa zein); and milps (myo-inositol-1-phosphate synthase) (see U.S. Pat. No. 6,225,529, herein incorporated by reference). Gamma-zein and Glob-1 are endosperm-specific promoters. For dicots, seed-specific promoters include, but are not limited to, bean β-phaseolin, napin, β-conglycinin, soybean lectin, cruciferin, and the like. For monocots, seed-specific promoters include, but are not limited to, maize 15 kDa zein, 22 kDa zein, 27 kDa zein, g-zein, waxy, shrunken 1, shrunken 2, globulin 1, etc. See also WO 00/12733, where seed-preferred promoters from end1 and end2 genes are disclosed. A promoter that has “preferred” expression in a particular tissue is expressed in that tissue to a greater degree than in at least one other plant tissue. Some tissue-preferred promoters show expression almost exclusively in the particular tissue.

[0103] In an embodiment, the plant-expressed promoter is a vascular-specific promoter such as a phloem-specific promoter. A “vascular-specific” promoter, as used herein, is a promoter which is at least expressed in vascular cells, or a promoter which is preferentially expressed in vascular cells. Expression of a vascular-specific promoter need not be exclusively in vascular cells, expression in other cell types or tissues is possible. A “phloem-specific promoter” as used herein, is a plant-expressible promoter which is at least expressed in phloem cells, or a promoter which is preferentially expressed in phloem cells.

[0104] Expression of a phloem-specific promoter need not be exclusively in phloem cells, expression in other cell types or tissues, e.g., xylem tissue, is possible. In one embodiment of this invention, a phloem-specific promoter is a plant-expressible promoter at least expressed in phloem cells, wherein the expression in non-phloem cells is more limited (or absent) compared to the expression in phloem cells. Examples of suitable vascular-specific or phloem-specific promoters in accordance with this invention include but are not limited to the promoters selected from the group consisting of: the SCSV3, SCSV4, SCSV5, and SCSV7 promoters (Schunmann et al. (2003) Plant Functional Biology 30:453-60; the rolC gene promoter of Agrobacterium rhizogenes(Kiyokawa et al. (1994) Plant Physiology 104:801-02; Pandolfini et al. (2003) BioMedCentral (BMC)Biotechnology 3:7, (www.biomedcentral.com/1472-6750/3/7); Graham et al. (1997) Plant Mol. Biol. 33:729-35; Guivarc'h et al. (1996); Almon et al. (1997) Plant Physiol. 115:1599-607; the rolA gene promoter of Agrobacterium rhizogenes (Dehio et al. (1993) Plant Mol. Biol. 23:1199-210); the promoter of the Agrobacterium tumefaciens T-DNA gene 5 (Korber et al. (1991) EMBO J. 10:3983-91); the rice sucrose synthase RSs1 gene promoter (Shi et al. (1994) J. Exp. Bot. 45:623-31); the CoYMV or Commelina yellow mottle badnavirus promoter (Medberry et al. (1992) Plant Cell 4:185-92; Zhou et al. (1998) Chin. J. Biotechnol. 14:9-16); the CFDV or coconut foliar decay virus promoter (Rohde et al. (1994) Plant Mol. Biol. 27:623-28; Hehn and Rhode (1998) J. Gen. Virol. 79:1495-99); the RTBV or rice tungro bacilliform virus promoter (Yin and Beachy (1995) Plant J. 7:969-80; Yin et al. (1997) Plant J. 12:1179-80); the pea glutamin synthase GS3A gene (Edwards et al. (1990) Proc. Natl. Acad. Sci. USA 87:3459-63; Brears et al. (1991) Plant J. 1:235-44); the inv CD111 and inv CD141 promoters of the potato invertase genes (Hedley et al. (2000) J. Exp. Botany 51:817-21); the promoter isolated from Arabidopsis shown to have phloem-specific expression in tobacco by Kertbundit et al. (1991) Proc. Natl. Acad. Sci. USA 88:5212-16); the VAHOX1 promoter region (Tornero et al. (1996) Plant J. 9:639-48); the pea cell wall invertase gene promoter (Zhang et al. (1996) Plant Physiol. 112:1111-17); the promoter of the endogenous cotton protein related to chitinase of US published patent application 20030106097, an acid invertase gene promoter from carrot (Ramloch-Lorenz et al. (1993) The Plant J. 4:545-54); the promoter of the sulfate transporter gene, Sultr1; 3 (Yoshimoto et al. (2003) Plant Physiol. 131:1511-17); a promoter of a sucrose synthase gene (Nolte and Koch (1993) Plant Physiol. 101:899-905); and the promoter of a tobacco sucrose transporter gene (Kuhn et al. (1997) Science 275-1298-1300).

[0105] Possible promoters also include the Black Cherry promoter for Prunasin Hydrolase (PH DL1.4 PRO) (U.S. Pat. No. 6,797,859), Thioredoxin H promoter from cucumber and rice (Fukuda A et al. (2005). Plant Cell Physiol. 46(11):1779-86), Rice (RSs1) (Shi, T. Wang et al. (1994). J. Exp. Bot. 45(274): 623-631) and maize sucrose synthase-1 promoters (Yang, N-S. et al. (1990) PNAS 87:4144-4148), PP2 promoter from pumpkin Guo, H. et al. (2004) Transgenic Research 13:559-566), At SUC2 promoter (Truernit, E. et al. (1995) Planta 196(3):564-70. At SAM-1 (S-adenosylmethionine synthetase) (Mijnsbrugge K V. et al. (1996) Plant Cell. Physiol. 37(8): 1108-1115), and the Rice tungro bacilliform virus (RTBV) promoter (Bhattacharyya-Pakrasi et al. (1993) Plant J. 4(1):71-79).

[0106] Where low level expression is desired, weak promoters may be used. Generally, the term “weak promoter” as used herein refers to a promoter that drives expression of a coding sequence at a low level. By low level expression at levels of about 1/1000 transcripts to about 1/100,000 transcripts to about 1/500,000 transcripts is intended. Alternatively, it is recognized that the term “weak promoters” also encompasses promoters that drive expression in only a few cells and not in others to give a total low level of expression. Where a promoter drives expression at unacceptably high levels, portions of the promoter sequence can be deleted or modified to decrease expression levels.

[0107] Such weak constitutive promoters include, for example the core promoter of the Rsyn7 promoter (WO 99/43838 and U.S. Pat. No. 6,072,050), the core 35S CaMV promoter, and the like. Other constitutive promoters include, for example, those disclosed in U.S. Pat. Nos. 5,608,149; 5,608,144; 5,604,121; 5,569,597; 5,466,785; 5,399,680; 5,268,463; 5,608,142; and 6,177,611.

[0108] The expression cassette can also comprise a selectable marker gene for the selection of transformed cells. Selectable marker genes are utilized for the selection of transformed cells or tissues. Marker genes include genes encoding antibiotic resistance, such as those encoding neomycin phosphotransferase II (NEO) and hygromycin phosphotransferase (HPT), as well as genes conferring resistance to herbicidal compounds, such as glufosinate ammonium, bromoxynil, imidazolinones, and 2,4-dichlorophenoxyacetate (2,4-D). Additional selectable markers include phenotypic markers such as β-galactosidase and fluorescent proteins such as green fluorescent protein (GFP) (Su et al. (2004) Biotechnol Bioeng 85:610-9 and Fetter et al. (2004) Plant Cell 16:215-28), cyan florescent protein (CYP) (Bolte et al. (2004) J. Cell Science 117:943-54 and Kato et al. (2002) Plant Physiol 129:913-42), and yellow florescent protein (PhiYFP™ from Evrogen, see, Bolte et al. (2004) J. Cell Science 117:943-54). For additional selectable markers, see generally, Yarranton (1992) Curr. Opin. Biotech. 3:506-511; Christopherson et al. (1992) Proc. Natl. Acad. Sci. USA 89:6314-6318; Yao et al. (1992) Cell 71:63-72; Reznikoff (1992) Mol. Microbiol. 6:2419-2422; Barkley et al. (1980) in The Operon, pp. 177-220; Hu et al. (1987) Cell 48:555-566; Brown et al. (1987) Cell 49:603-612; Figge et al. (1988) Cell 52:713-722; Deuschle et al. (1989) Proc. Natl. Acad. Sci. USA 86:5400-5404; Fuerst et al. (1989) Proc. Natl. Acad. Sci. USA 86:2549-2553; Deuschle et al. (1990) Science 248:480-483; Gossen (1993) Ph.D. Thesis, University of Heidelberg; Reines et al. (1993) Proc. Natl. Acad. Sci. USA 90:1917-1921; Labow et al. (1990) Mol. Cell. Biol. 10:3343-3356; Zambretti et al. (1992) Proc. Natl. Acad. Sci. USA 89:3952-3956; Bann et al. (1991) Proc. Natl. Acad. Sci. USA 88:5072-5076; Wyborski et al. (1991) Nucleic Acids Res. 19:4647-4653; Hillenand-Wissman (1989) Topics Mol. Struc. Biol. 10:143-162; Degenkolb et al. (1991) Antimicrob. Agents Chemother. 35:1591-1595; Kleinschnidt et al. (1988) Biochemistry 27:1094-1104; Bonin (1993) Ph.D. Thesis, University of Heidelberg; Gossen et al. (1992) Proc. Natl. Acad. Sci. USA 89:5547-5551; Oliva et al. (1992) Antimicrob. Agents Chemother. 36:913-919; Hlavka et al. (1985) Handbook of Experimental Pharmacology, Vol. 78 (Springer-Verlag, Berlin); Gill et al. (1988) Nature 334:721-724. The above list of selectable marker genes is not meant to be limiting. Any selectable marker gene can be used with the compositions and methods described herein.

### VI. Compositions Comprising Silencing Elements

[0109] One or more of the polynucleotides comprising the silencing element may be provided as an external composition such as a spray or powder to the plant, plant part, seed, a plant insect pest, or an area of cultivation. In another example, a plant is transformed with a DNA construct or expression cassette for expression of at least one silencing element. In either composition, the silencing element, when ingested by an insect, can reduce the level of a target pest sequence and thereby control the pest (i.e., a Coleopteran plant pest including a Diabrotica plant pest, such as, D. virgifera virgifera, D. barberi, D. virgifera zeae, D. speciosa, or D. undecimpunctata). It is recognized that the composition may comprise a cell (such as plant cell or a bacterial cell), in which a polynucleotide encoding the silencing element is stably incorporated into the genome and operably linked to promoters active in the cell. Compositions comprising a mixture of cells, some cells expressing at least one silencing element are also encompassed. In other embodiments, compositions comprising the silencing elements are not contained in a cell. In such embodiments, the composition can be applied to an area inhabited by a plant insect pest. In one embodiment, the composition is applied externally to a plant (i.e., by spraying a field or area of cultivation) to protect the plant from the pest. Methods of applying nucleotides in such a manner are known to those of skill in the art.

[0110] A composition disclosed herein may further be formulated as bait. In this embodiment, the compositions comprise a food substance or an attractant which enhances the attractiveness of the composition to the pest.

[0111] A composition comprising the silencing element may be formulated in an agriculturally suitable and/or environmentally acceptable carrier. Such carriers may be any material that the animal, plant or environment to be treated can tolerate. Furthermore, the carrier must be such that the composition remains effective at controlling a plant insect pest. Examples of such carriers include water, saline, Ringer's solution, dextrose or other sugar solutions, Hank's solution, and other aqueous physiologically balanced salt solutions, phosphate buffer, bicarbonate buffer and Tris buffer. In addition, the composition may include compounds that increase the half-life of a composition. Various insecticidal formulations can also be found in, for example, US Publications 2008/0275115, 2008/0242174, 2008/0027143, 2005/0042245, and 2004/0127520.

[0112] It is recognized that the polynucleotides comprising sequences encoding the silencing element may be used to transform organisms to provide for host organism production of these components, and subsequent application of the host organism to the environment of the target pest(s). Such host organisms include baculoviruses, bacteria, and the like. In this manner, the combination of polynucleotides encoding the silencing element may be introduced via a suitable vector into a microbial host, and said host applied to the environment, or to plants or animals.

[0113] The term “introduced” in the context of inserting a nucleic acid into a cell, means “transfection” or “transformation” or “transduction” and includes reference to the incorporation of a nucleic acid into a eukaryotic or prokaryotic cell where the nucleic acid may be stably incorporated into the genome of the cell (e.g., chromosome, plasmid, plastid, or mitochondrial DNA), converted into an autonomous replicon, or transiently expressed (e.g., transfected mRNA).

[0114] Microbial hosts that are known to occupy the “phytosphere” (phylloplane, phyllosphere, rhizosphere, and/or rhizoplana) of one or more crops of interest may be selected. These microorganisms are selected so as to be capable of successfully competing in the particular environment with the wild-type microorganisms, provide for stable maintenance and expression of the sequences encoding the silencing element, and desirably, provide for improved protection of the components from environmental degradation and inactivation.

[0115] Such microorganisms include bacteria, algae, and fungi. Of particular interest are microorganisms such as bacteria, e.g., Pseudomonas, Erwinia, Serratia, Klebsiella, Xanthomonas, Streptomyces, Rhizobium, Rhodopseudomonas, Methylius, Agrobacterium, Acetobacter, Lactobacillus, Arthrobacter, Azotobacter, Leuconostoc, and Alcaligenes, fungi, particularly yeast, e.g., Saccharomyces, Cryptococcus, Kluyveromyces, Sporobolomyces, Rhodotorula, and Aureobasidium. Of particular interest are such phytosphere bacterial species as Pseudomonas syringae, Pseudomonas fluorescens, Serratia marcescens, Acetobacter xylinum, Agrobacteria, Rhodopseudomonas spheroides, Xanthomonas campestris, Rhizobium melioti, Alcaligenes entrophus, Clavibacter xyli and Azotobacter vinlandir, and phytosphere yeast species such as Rhodotorula rubra, R. glutinis, R. marina, R. aurantiaca, Cryptococcus albidus, C. diffluens, C. laurentii, Saccharomyces rosei, S. pretoriensis, S. cerevisiae, Sporobolomyces rosues, S. odorus, Kluyveromyces veronae, and Aureobasidium pollulans. Of particular interest are the pigmented microorganisms.

[0116] A number of ways are available for introducing the polynucleotide encoding the silencing element into the microbial host under conditions that allow for stable maintenance and expression of such nucleotide encoding sequences. For example, expression cassettes can be constructed which include the nucleotide constructs of interest operably linked with the transcriptional and translational regulatory signals for expression of the nucleotide constructs, and a nucleotide sequence homologous with a sequence in the host organism, whereby integration will occur, and/or a replication system that is functional in the host, whereby integration or stable maintenance will occur.

[0117] Transcriptional and translational regulatory signals include, but are not limited to, promoters, transcriptional initiation start sites, operators, activators, enhancers, other regulatory elements, ribosomal binding sites, an initiation codon, termination signals, and the like. See, for example, U.S. Pat. Nos. 5,039,523 and 4,853,331; EP 0480762A2; Sambrook et al. (2000); Molecular Cloning: A Laboratory Manual (3^{rd} edition; Cold Spring Harbor Laboratory Press, Plainview, N.Y.); Davis et al. (1980) Advanced Bacterial Genetics (Cold Spring Harbor Laboratory, Cold Spring Harbor, N.Y.); and the references cited therein.

[0118] Suitable host cells include the prokaryotes and the lower eukaryotes, such as fungi. Illustrative prokaryotes, both Gram-negative and Gram-positive, include Enterobacteriaceae, such as Escherichia, Erwinia, Shigella, Salmonella, and Proteus; Bacillaceae; Rhizobiceae, such as Rhizobium; Spirillaceae, such as photobacterium, Zymomonas, Serratia, Aeromonas, Vibrio, Desulfovibrio, Spirillum; Lactobacillaceae; Pseudomonadaceae, such as Pseudomonas and Acetobacter; Azotobacteraceae and Nitrobacteraceae. Among eukaryotes are fungi, such as Phycomycetes and Ascomycetes, which includes yeast, such as Saccharomyces and Schizosaccharomyces; and Basidiomycetes yeast, such as Rhodotorula, Aureobasidium, Sporobolomyces, and the like.

[0119] Characteristics of particular interest in selecting a host cell may include ease of introducing the coding sequence into the host, availability of expression systems, efficiency of expression, stability in the host, and the presence of auxiliary genetic capabilities. Characteristics of interest for use as a pesticide microcapsule include protective qualities, such as thick cell walls, pigmentation, and intracellular packaging or formation of inclusion bodies; leaf affinity; lack of mammalian toxicity; attractiveness to pests for ingestion; and the like. Other considerations include ease of formulation and handling, economics, storage stability, and the like.

[0120] Host organisms of particular interest include yeast, such as Rhodotorula spp., Aureobasidium spp., Saccharomyces spp., and Sporobolomyces spp., phylloplane organisms such as Pseudomonas spp., Erwinia spp., and Flavobacterium spp., and other such organisms, including Pseudomonas aeruginosa, Pseudomonas fluorescens, Saccharomyces cerevisiae, Bacillus thuringiensis, Escherichia coli, Bacillus subtilis, and the like.

[0121] The sequences encoding the silencing elements encompassed by the invention may be introduced into microorganisms that multiply on plants (epiphytes) to deliver these components to potential target pests. Epiphytes, for example, can be gram-positive or gram-negative bacteria.

[0122] A silencing element may be fermented in a bacterial host and the resulting bacteria processed and used as a microbial spray in the same manner that Bacillus thuringiensis strains have been used as insecticidal sprays. Any suitable microorganism can be used for this purpose. By way of example, Pseudomonas has been used to express Bacillus thuringiensis endotoxins as encapsulated proteins and the resulting cells processed and sprayed as an insecticide Gaertner et al. (1993), in Advanced Engineered Pesticides, ed. L. Kim (Marcel Decker, Inc.).

[0123] Alternatively, the components of the composition disclosed herein are produced by introducing heterologous genes into a cellular host. Expression of the heterologous sequences results, directly or indirectly, in the intracellular production of a silencing element. These compositions may then be formulated in accordance with conventional techniques for application to the environment hosting a target pest, e.g., soil, water, and foliage of plants. See, for example, EPA 0192319, and the references cited therein.

[0124] A transformed microorganism can be formulated with an acceptable carrier into separate or combined compositions that are, for example, a suspension, a solution, an emulsion, a dusting powder, a dispersible granule, a wettable powder, and an emulsifiable concentrate, an aerosol, an impregnated granule, an adjuvant, a coatable paste, and also encapsulations in, for example, polymer substances.

[0125] Such compositions disclosed above may be obtained by the addition of a surface-active agent, an inert carrier, a preservative, a humectant, a feeding stimulant, an attractant, an encapsulating agent, a binder, an emulsifier, a dye, a UV protectant, a buffer, a flow agent or fertilizers, micronutrient donors, or other preparations that influence plant growth. One or more agrochemicals including, but not limited to, herbicides, insecticides, fungicides, bactericides, nematicides, molluscicides, acaracides, plant growth regulators, harvest aids, and fertilizers, can be combined with carriers, surfactants or adjuvants customarily employed in the art of formulation or other components to facilitate product handling and application for particular target pests. Suitable carriers and adjuvants can be solid or liquid and correspond to the substances ordinarily employed in formulation technology, e.g., natural or regenerated mineral substances, solvents, dispersants, wetting agents, tackifiers, binders, or fertilizers. The active ingredients (i.e., at least one silencing element) are normally applied in the form of compositions and can be applied to the crop area, plant, or seed to be treated. For example, the compositions may be applied to grain in preparation for or during storage in a grain bin or silo, etc. The compositions may be applied simultaneously or in succession with other compounds. Methods of applying an active ingredient or a composition that contains at least one silencing element include, but are not limited to, foliar application, seed coating, and soil application. The number of applications and the rate of application depend on the intensity of infestation by the corresponding pest.

[0126] Suitable surface-active agents include, but are not limited to, anionic compounds such as a carboxylate of, for example, a metal; carboxylate of a long chain fatty acid; an N-acylsarcosinate; mono- or di-esters of phosphoric acid with fatty alcohol ethoxylates or salts of such esters; fatty alcohol sulfates such as sodium dodecyl sulfate, sodium octadecyl sulfate, or sodium cetyl sulfate; ethoxylated fatty alcohol sulfates; ethoxylated alkylphenol sulfates; lignin sulfonates; petroleum sulfonates; alkyl aryl sulfonates such as alkyl-benzene sulfonates or lower alkylnaphtalene sulfonates, e.g., butyl-naphthalene sulfonate; salts of sulfonated naphthalene-formaldehyde condensates; salts of sulfonated phenol-formaldehyde condensates; more complex sulfonates such as the amide sulfonates, e.g., the sulfonated condensation product of oleic acid and N-methyl taurine; or the dialkyl sulfosuccinates, e.g., the sodium sulfonate or dioctyl succinate. Non-ionic agents include condensation products of fatty acid esters, fatty alcohols, fatty acid amides or fatty-alkyl- or alkenyl-substituted phenols with ethylene oxide, fatty esters of polyhydric alcohol ethers, e.g., sorbitan fatty acid esters, condensation products of such esters with ethylene oxide, e.g., polyoxyethylene sorbitan fatty acid esters, block copolymers of ethylene oxide and propylene oxide, acetylenic glycols such as 2,4,7,9-tetraethyl-5-decyn-4,7-diol, or ethoxylated acetylenic glycols. Examples of a cationic surface-active agent include, for instance, an aliphatic mono-, di-, or polyamine such as an acetate, naphthenate or oleate; or oxygen-containing amine such as an amine oxide of polyoxyethylene alkylamine; an amide-linked amine prepared by the condensation of a carboxylic acid with a di- or polyamine; or a quaternary ammonium salt.

[0127] Examples of inert materials include, but are not limited to, inorganic minerals such as kaolin, phyllosilicates, carbonates, sulfates, phosphates, or botanical materials such as cork, powdered corncobs, peanut hulls, rice hulls, and walnut shells.

[0128] The compositions comprising a silencing element may be in a suitable form for direct application or as a concentrate of primary composition that requires dilution with a suitable quantity of water or other dilutant before application.

[0129] The compositions (including the transformed microorganisms) may be applied to the environment of an insect pest (such as a Coleoptera plant pest or a Diabrotica plant pest) by, for example, spraying, atomizing, dusting, scattering, coating or pouring, introducing into or on the soil, introducing into irrigation water, by seed treatment or general application or dusting at the time when the pest has begun to appear or before the appearance of pests as a protective measure. For example, the composition(s) and/or transformed microorganism(s) may be mixed with grain to protect the grain during storage. It is generally important to obtain good control of pests in the early stages of plant growth, as this is the time when the plant can be most severely damaged. The compositions can conveniently contain another insecticide if this is thought necessary. In an embodiment of the invention, the composition(s) is applied directly to the soil, at a time of planting, in granular form of a composition of a carrier and dead cells of a Bacillus strain or transformed microorganism of the invention. Another embodiment is a granular form of a composition comprising an agrochemical such as, for example, an herbicide, an insecticide, a fertilizer, in an inert carrier, and dead cells of a Bacillus strain or transformed microorganism of the invention.

VII. Plants, Plant Parts, and Methods of Introducing Sequences into Plants

[0130] In one embodiment, the methods of the invention involve introducing a polynucleotide into a plant. “Introducing” is intended to mean presenting to the plant the polynucleotide in such a manner that the sequence gains access to the interior of a cell of the plant. The methods of the invention do not depend on a particular method for introducing a sequence into a plant, only that the polynucleotide or polypeptides gains access to the interior of at least one cell of the plant. Methods for introducing polynucleotides into plants are known in the art including, but not limited to, stable transformation methods, transient transformation methods, and virus-mediated methods.

[0131] “Stable transformation” is intended to mean that the nucleotide construct introduced into a plant integrates into the genome of the plant and is capable of being inherited by the progeny thereof. “Transient transformation” is intended to mean that a polynucleotide is introduced into the plant and does not integrate into the genome of the plant or a polypeptide is introduced into a plant.

[0132] Transformation protocols as well as protocols for introducing polypeptides or polynucleotide sequences into plants may vary depending on the type of plant or plant cell, i.e., monocot or dicot, targeted for transformation. Suitable methods of introducing polypeptides and polynucleotides into plant cells include microinjection (Crossway et al. (1986) Biotechniques 4:320-334), electroporation (Riggs et al. (1986) Proc. Natl. Acad. Sci. USA 83:5602-5606, Agrobacterium-mediated transformation (U.S. Pat. Nos. 5,563,055 and 5,981,840), direct gene transfer (Paszkowski et al. (1984) EMBO J. 3:2717-2722), and ballistic particle acceleration (see, for example, U.S. Pat. Nos. 4,945,050; 5,879,918; 5,886,244; and, 5,932,782; Tomes et al. (1995) in Plant Cell, Tissue, and Organ Culture: Fundamental Methods, ed. Gamborg and Phillips (Springer-Verlag, Berlin); McCabe et al. (1988) Biotechnology 6:923-926); and Lec1 transformation (WO 00/28058). Also see Weissinger et al. (1988) Ann. Rev. Genet. 22:421-477; Sanford et al. (1987) Particulate Science and Technology 5:27-37 (onion); Christou et al. (1988) Plant Physiol. 87:671-674 (soybean); McCabe et al. (1988) Bio/Technology 6:923-926 (soybean); Finer and McMullen (1991) In Vitro Cell Dev. Biol. 27P: 175-182 (soybean); Singh et al. (1998) Theor. Appl. Genet. 96:319-324 (soybean); Datta et al. (1990) Biotechnology 8:736-740 (rice); Klein et al. (1988) Proc. Natl. Acad. Sci. USA 85:4305-4309 (maize); Klein et al. (1988) Biotechnology 6:559-563 (maize); U.S. Pat. Nos. 5,240,855; 5,322,783; and, 5,324,646; Klein et al. (1988) Plant Physiol. 91:440-444 (maize); Fromm et al. (1990) Biotechnology 8:833-839 (maize); Hooykaas-Van Slogteren et al. (1984) Nature (London) 311:763-764; U.S. Pat. No. 5,736,369 (cereals); Bytebier et al. (1987) Proc. Natl. Acad. Sci. USA 84:5345-5349 (Liliaceae); De Wet et al. (1985) in The Experimental Manipulation of Ovule Tissues, ed. Chapman et al. (Longman, N.Y.), pp. 197-209 (pollen); Kaeppler et al. (1990) Plant Cell Reports 9:415-418 and Kaeppler et al. (1992) Theor. Appl. Genet. 84:560-566 (whisker-mediated transformation); D'Halluin et al. (1992) Plant Cell 4:1495-1505 (electroporation); Li et al. (1993) Plant Cell Reports 12:250-255 and Christou and Ford (1995) Annals of Botany 75:407-413 (rice); Osjoda et al. (1996) Nature Biotechnology 14:745-750 (maize via Agrobacterium tumefaciens).

[0133] In certain embodiments, a silencing element disclosed herein may be provided to a plant using a variety of transient transformation methods. Such transient transformation methods include, but are not limited to, the introduction of the protein or variants or fragments thereof directly into the plant or the introduction of the transcript into the plant. Such methods include, for example, microinjection or particle bombardment. See, for example, Crossway et al. (1986) Mol Gen. Genet. 202:179-185; Nomura et al. (1986) Plant Sci. 44:53-58; Hepler et al. (1994) Proc. Natl. Acad. Sci. 91: 2176-2180 and Hush et al. (1994) The Journal of Cell Science 107:775-784. Alternatively, polynucleotides can be transiently transformed into the plant using techniques known in the art. Such techniques include viral vector systems and the precipitation of the polynucleotide in a manner that precludes subsequent release of the DNA. Such methods include the use of particles coated with polyethylimine (PEI; Sigma #P3143).

[0134] In other embodiments, the polynucleotides disclosed herein may be introduced into plants by contacting plants with a virus or viral nucleic acids. Generally, such methods involve incorporating a nucleotide construct of the invention within a viral DNA or RNA molecule. Further, it is recognized that promoters may also encompass promoters utilized for transcription by viral RNA polymerases. Methods for introducing polynucleotides into plants and expressing a protein encoded therein, involving viral DNA or RNA molecules, are known in the art. See, for example, U.S. Pat. Nos. 5,889,191, 5,889,190, 5,866,785, 5,589,367, 5,316,931, and Porta et al. (1996) Molecular Biotechnology 5:209-221.

[0135] Methods are known in the art for the targeted insertion of a polynucleotide at a specific location in the plant genome. In one embodiment, the insertion of the polynucleotide at a desired genomic location is achieved using a site-specific recombination system. See, for example, WO99/25821, WO99/25854, WO99/25840, WO99/25855, and WO99/25853. Briefly, the polynucleotides disclosed herein may be contained in transfer cassette flanked by two non-recombinogenic recombination sites. The transfer cassette is introduced into a plant having stably incorporated into its genome a target site which is flanked by two non-recombinogenic recombination sites that correspond to the sites of the transfer cassette. An appropriate recombinase is provided and the transfer cassette is integrated at the target site. The polynucleotide of interest is thereby integrated at a specific chromosomal position in the plant genome.

[0136] The cells that have been transformed may be grown into plants in accordance with conventional ways. See, for example, McCormick et al. (1986) Plant Cell Reports 5:81-84. These plants may then be grown, and either pollinated with the same transformed strain or different strains, and the resulting progeny having constitutive expression of the desired phenotypic characteristic identified. Two or more generations may be grown to ensure that expression of the desired phenotypic characteristic is stably maintained and inherited and then seeds harvested to ensure expression of the desired phenotypic characteristic has been achieved. In this manner, the compositions and methods described herein provide transformed seeds (also referred to as “transgenic seed”) having a polynucleotide disclosed herein, for example, an expression cassette, stably incorporated into their genome.

[0137] As used herein, the term plant includes plant cells, plant protoplasts, plant cell tissue cultures from which plants can be regenerated, plant calli, plant clumps, and plant cells that are intact in plants or parts of plants such as embryos, pollen, ovules, seeds, leaves, flowers, branches, fruit, kernels, ears, cobs, husks, stalks, roots, root tips, anthers, and the like. Grain is intended to mean the mature seed produced by commercial growers for purposes other than growing or reproducing the species. Progeny, variants, and mutants of the regenerated plants are also included within the scope of the invention, provided that these parts comprise the introduced polynucleotides.

[0138] The compositions and methods described herein may be used for transformation of any plant species, including, but not limited to, monocots and dicots. Examples of plant species of interest include, but are not limited to, corn (Zea mays), Brassica sp. (e.g., B. napus, B. rapa, B. juncea), particularly those Brassica species useful as sources of seed oil, alfalfa (Medicago sativa), rice (Oryza sativa), rye (Secale cereale), sorghum (Sorghum bicolor, Sorghum vulgare), millet (e.g., pearl millet (Pennisetum glaucum), proso millet (Panicum miliaceum), foxtail millet (Setaria italica), finger millet (Eleusine coracana)), sunflower (Helianthus annuus), safflower (Carthamus tinctorius), wheat (Triticum aestivum), soybean (Glycine max), tobacco (Nicotiana tabacum), potato (Solanum tuberosum), peanuts (Arachis hypogaea), cotton (Gossypium barbadense, Gossypium hirsutum), sweet potato (Ipomoea batatus), cassava (Manihot esculenta), coffee (Coffea spp.), coconut (Cocos nucifera), pineapple (Ananas comosus), citrus trees (Citrus spp.), cocoa (Theobroma cacao), tea (Camellia sinensis), banana (Musa spp.), avocado (Persea americana), fig (Ficus casica), guava (Psidium guajava), mango (Mangifera indica), olive (Olea europaea), papaya (Carica papaya), cashew (Anacardium occidentale), macadamia (Macadamia integrifolia), almond (Prunus amygdalus), sugar beets (Beta vulgaris), sugarcane (Saccharum spp.), oats, barley, vegetables, ornamentals, and conifers.

[0139] Vegetables include tomatoes (Lycopersicon esculentum), lettuce (e.g., Lactuca sativa), green beans (Phaseolus vulgaris), lima beans (Phaseolus limensis), peas (Lathyrus spp.), and members of the genus Cucumis such as cucumber (C. sativus), cantaloupe (C. cantalupensis), and musk melon (C. melo). Ornamentals include azalea (Rhododendron spp.), hydrangea (Macrophylla hydrangea), hibiscus (Hibiscus rosasanensis), roses (Rosa spp.), tulips (Tulipa spp.), daffodils (Narcissus spp.), petunias (Petunia hybrida), carnation (Dianthus caryophyllus), poinsettia (Euphorbia pulcherrima), and chrysanthemum.

[0140] Conifers that may be employed in practicing the compositions and methods described herein include, for example, pines such as loblolly pine (Pinus taeda), slash pine (Pinus elliotii), ponderosa pine (Pinus ponderosa), lodgepole pine (Pinus contorta), and Monterey pine (Pinus radiata); Douglas-fir (Pseudotsuga menziesii); Western hemlock (Tsuga canadensis); Sitka spruce (Picea glauca); redwood (Sequoia sempervirens); true firs such as silver fir (Abies amabilis) and balsam fir (Abies balsamea); and cedars such as Western red cedar (Thuja plicata) and Alaska yellow-cedar (Chamaecyparis nootkatensis). In certain embodiments, the compositions and methods described herein can be used with plants such as crop plants (for example, corn, alfalfa, sunflower, Brassica, soybean, cotton, safflower, peanut, sorghum, wheat, millet, tobacco, etc.). In other embodiments, corn and soybean plants and sugarcane plants are optimal, and in yet other embodiments corn plants are optimal.

[0141] Other plants of interest include grain plants that provide seeds of interest, oil-seed plants, and leguminous plants. Seeds of interest include grain seeds, such as corn, wheat, barley, rice, sorghum, rye, etc. Oil-seed plants include cotton, soybean, safflower, sunflower, Brassica, maize, alfalfa, palm, coconut, etc. Leguminous plants include beans and peas. Beans include guar, locust bean, fenugreek, soybean, garden beans, cowpea, mungbean, lima bean, fava bean, lentils, chickpea, etc.

### VIII. Stacking of Traits in Transgenic Plant

[0142] Transgenic plants may comprise a stack of one or more target polynucleotides as set forth in SEQ ID NOS.: 1-398, or variants or fragments thereof, or complements thereof, as disclosed herein with one or more additional polynucleotides resulting in the production or suppression of multiple polypeptide sequences. Transgenic plants comprising stacks of polynucleotide sequences can be obtained by either or both of traditional breeding methods or through genetic engineering methods. These methods include, but are not limited to, breeding individual lines each comprising a polynucleotide of interest, transforming a transgenic plant comprising an expression construct comprising various target polynucleotides as set forth in SEQ ID NOS.: 1-398, or encoding silencing elements directed to such target sequence variants or fragments thereof, or complements thereof, as disclosed herein with a subsequent gene and co-transformation of genes into a single plant cell. As used herein, the term “stacked” includes having the multiple traits present in the same plant (i.e., both traits are incorporated into the nuclear genome, one trait is incorporated into the nuclear genome and one trait is incorporated into the genome of a plastid or both traits are incorporated into the genome of a plastid). In one non-limiting example, “stacked traits” comprise a molecular stack where the sequences are physically adjacent to each other. A trait, as used herein, refers to the phenotype derived from a particular sequence or groups of sequences. Co-transformation of polynucleotides can be carried out using single transformation vectors comprising multiple polynucleotides or polynucleotides carried separately on multiple vectors. If the sequences are stacked by genetically transforming the plants, the polynucleotide sequences of interest can be combined at any time and in any order. The traits can be introduced simultaneously in a co-transformation protocol with the polynucleotides of interest provided by any combination of transformation cassettes. For example, if two sequences will be introduced, the two sequences can be contained in separate transformation cassettes (trans) or contained on the same transformation cassette (cis). Expression of the sequences can be driven by the same promoter or by different promoters. It is further recognized that polynucleotide sequences can be stacked at a desired genomic location using a site-specific recombination system. See, for example, WO 1999/25821, WO 1999/25854, WO 1999/25840, WO 1999/25855 and WO 1999/25853.

[0143] In some embodiments the various target polynucleotides as set forth in SEQ ID NOS.: 1-398, silencing elements directed to such target sequences, and variants or fragments thereof, or complements thereof, as disclosed herein, alone or stacked with one or more additional insect resistance traits can be stacked with one or more additional input traits (e.g., herbicide resistance, fungal resistance, virus resistance, stress tolerance, disease resistance, male sterility, stalk strength, and the like) or output traits (e.g., increased yield, modified starches, improved oil profile, balanced amino acids, high lysine or methionine, increased digestibility, improved fiber quality, drought resistance, and the like). Thus, the polynucleotide embodiments can be used to provide a complete agronomic package of improved crop quality with the ability to flexibly and cost effectively control any number of agronomic pests.

[0144] Transgenes useful for stacking include, but are not limited to, to those as described herein below.

[0145] i. Transgenes that Confer Resistance to Insects or Disease

[0146] (A) Plant disease resistance genes. Plant defenses are often activated by specific interaction between the product of a disease resistance gene (R) in the plant and the product of a corresponding avirulence (Avr) gene in the pathogen. A plant variety can be transformed with cloned resistance gene to engineer plants that are resistant to specific pathogen strains. See, for example, Jones, et al., (1994) Science 266:789 (cloning of the tomato Cf-9 gene for resistance to Cladosporium fulvum); Martin, et al., (1993) Science 262:1432 (tomato Pto gene for resistance to Pseudomonas syringae pv. tomato encodes a protein kinase); Mindrinos, et al., (1994) Cell 78:1089 (Arabidopsis RSP2 gene for resistance to Pseudomonas syringae), McDowell and Woffenden, (2003) Trends Biotechnol. 21(4):178-83 and Toyoda, et al., (2002) Transgenic Res. 11(6):567-82. A plant resistant to a disease is one that is more resistant to a pathogen as compared to the wild type plant.

[0147] (B) Genes encoding a Bacillus thuringiensis protein, a derivative thereof or a synthetic polypeptide modeled thereon. See, for example, Geiser, et al., (1986) Gene 48:109, who disclose the cloning and nucleotide sequence of a Bt delta-endotoxin gene. Moreover, DNA molecules encoding delta-endotoxin genes can be purchased from American Type Culture Collection (Rockville, Md.), for example, under ATCC® Accession Numbers 40098, 67136, 31995 and 31998. Other non-limiting examples of Bacillus thuringiensis transgenes being genetically engineered are given in the following patents and patent applications and hereby are incorporated by reference for this purpose: U.S. Pat. Nos. 5,188,960; 5,689,052; 5,880,275; 5,986,177; 6,023,013, 6,060,594, 6,063,597, 6,077,824, 6,620,988, 6,642,030, 6,713,259, 6,893,826, 7,105,332; 7,179,965, 7,208,474; 7,227,056, 7,288,643, 7,323,556, 7,329,736, 7,449,552, 7,468,278, 7,510,878, 7,521,235, 7,544,862, 7,605,304, 7,696,412, 7,629,504, 7,705,216, 7,772,465, 7,790,846, 7,858,849 and WO 1991/14778; WO 1999/31248; WO 2001/12731; WO 1999/24581 and WO 1997/40162.

[0148] Genes encoding pesticidal proteins may also be stacked including but are not limited to: insecticidal proteins from Pseudomonas sp. such as PSEEN3174 (Monalysin, (2011) PLoS Pathogens, 7:1-13), from Pseudomonas protegees strain CHA0 and Pf-5 (previously fluorescens) (Pechy-Tarr, (2008) Environmental Microbiology 10:2368-2386: GenBank Accession No. EU400157); from Pseudomonas taiwanensis (Liu, et al., (2010) J. Agric. Food Chem. 58:12343-12349) and from Pseudomonas pseudoalcligenes (Zhang, et al., (2009) Annals of Microbiology 59:45-50 and Li, et al., (2007) Plant Cell Tiss. Organ Cult. 89:159-168); insecticidal proteins from Photorhabdus sp. and Xenorhabdus sp. (Hinchliffe, et al., (2010) The Open Toxinology Journal 3:101-118 and Morgan, et al., (2001) Applied and Envir. Micro. 67:2062-2069), U.S. Pat. Nos. 6,048,838, and 6,379,946; a PIP-1 polypeptide of US Patent Publication US20140007292; an AfIP-1A and/or AfIP-1B polypeptide of US Patent Publication US20140033361; a PHI-4 polypeptide of US Patent Publication US20140274885 and US20160040184; a PIP-47 polypeptide of PCT Publication Number WO2015/023846, a PIP-72 polypeptide of PCT Publication Number WO2015/038734; a PtIP-50 polypeptide and a PtIP-65 polypeptide of PCT Publication Number WO2015/120270; a PtIP-83 polypeptide of PCT Publication Number WO2015/120276; a PtIP-96 polypeptide of PCT Serial Number PCT/US15/55502; and δ-endotoxins including, but not limited to, the Cry1, Cry2, Cry3, Cry4, Cry5, Cry6, Cry7, Cry8, Cry9, Cry10, Cry11, Cry12, Cry13, Cry14, Cry15, Cry16, Cry17, Cry18, Cry19, Cry20, Cry21, Cry22, Cry23, Cry24, Cry25, Cry26, Cry27, Cry 28, Cry 29, Cry 30, Cry31, Cry32, Cry33, Cry34, Cry35, Cry36, Cry37, Cry38, Cry39, Cry40, Cry41, Cry42, Cry43, Cry44, Cry45, Cry 46, Cry47, Cry49, Cry 51 and Cry55 classes of δ-endotoxin genes and the B. thuringiensis cytolytic Cyt1 and Cyt2 genes. Members of these classes of B. thuringiensis insecticidal proteins include, but are not limited to Cry1Aa1 (Accession #AAA22353); Cry1Aa2 (Accession #Accession #AAA22552); Cry1Aa3 (Accession #BAA00257); Cry1Aa4 (Accession #CAA31886); Cry1Aa5 (Accession #BAA04468); Cry1Aa6 (Accession #AAA86265); Cry1Aa7 (Accession #AAD46139); Cry1Aa8 (Accession #126149); Cry1Aa9 (Accession #BAA77213); Cry1Aa10 (Accession #AAD55382); Cry1Aa11 (Accession #CAA70856); Cry1Aa12 (Accession #AAP80146); Cry1Aa13 (Accession #AAM44305); Cry1Aa14 (Accession #AAP40639); Cry1Aa15 (Accession #AAY66993); Cry1Aa16 (Accession #HQ439776); Cry1Aa17 (Accession #HQ439788); Cry1Aa18 (Accession #HQ439790); Cry1Aa19 (Accession #HQ685121); Cry1Aa20 (Accession #JF340156); Cry1Aa21 (Accession #JN651496); Cry1Aa22 (Accession #KC158223); Cry1Ab1 (Accession #AAA22330); Cry1Ab2 (Accession #AAA22613); Cry1Ab3 (Accession #AAA22561); Cry1Ab4 (Accession #BAA00071); Cry1Ab5 (Accession #CAA28405); Cry1Ab6 (Accession #AAA22420); Cry1Ab7 (Accession #CAA31620); Cry1Ab8 (Accession #AAA22551); Cry1Ab9 (Accession #CAA38701); Cry1Ab10 (Accession #A29125); Cry1Ab11 (Accession #112419); Cry1Ab12 (Accession #AAC64003); Cry1Ab13 (Accession #AAN76494); Cry1Ab14 (Accession #AAG16877); Cry1Ab15 (Accession #AAO13302); Cry1Ab16 (Accession #AAK55546); Cry1Ab17 (Accession #AAT46415); Cry1Ab18 (Accession #AAQ88259); Cry1Ab19 (Accession #AAW31761); Cry1Ab20 (Accession #ABB72460); Cry1Ab21 (Accession #ABS18384); Cry1Ab22 (Accession #ABW87320); Cry1Ab23 (Accession #HQ439777); Cry1Ab24 (Accession #HQ439778); Cry1Ab25 (Accession #HQ685122); Cry1Ab26 (Accession #HQ847729); Cry1Ab27 (Accession #JN135249); Cry1Ab28 (Accession #JN135250); Cry1Ab29 (Accession #JN135251); Cry1Ab30 (Accession #JN135252); Cry1Ab31 (Accession #JN135253); Cry1Ab32 (Accession #JN135254); Cry1Ab33 (Accession #AAS93798); Cry1Ab34 (Accession #KC156668); Cry1Ab-like (Accession #AAK14336); Cry1Ab-like (Accession #AAK14337); Cry1Ab-like (Accession #AAK14338); Cry1Ab-like (Accession #ABG88858); Cry1Ac1 (Accession #AAA22331); Cry1Ac2 (Accession #AAA22338); Cry1Ac3 (Accession #CAA38098); Cry1Ac4 (Accession #AAA73077); Cry1Ac5 (Accession #AAA22339); Cry1Ac6 (Accession #AAA86266); Cry1Ac7 (Accession #AAB46989); Cry1Ac8 (Accession #AAC44841); Cry1Ac9 (Accession #AAB49768); Cry1Ac10 (Accession #CAA05505); Cry1Ac11 (Accession #CAA10270); Cry1Ac12 (Accession #112418); Cry1Ac13 (Accession #AAD38701); Cry1Ac14 (Accession #AAQ06607); Cry1Ac15 (Accession #AAN07788); Cry1Ac16 (Accession #AAU87037); Cry1Ac17 (Accession #AAX18704); Cry1Ac18 (Accession #AAY88347); Cry1Ac19 (Accession #ABD37053); Cry1Ac20 (Accession #ABB89046); Cry1Ac21 (Accession #AAY66992); Cry1Ac22 (Accession #ABZ01836); Cry1Ac23 (Accession #CAQ30431); Cry1Ac24 (Accession #ABL01535); Cry1Ac25 (Accession #FJ513324); Cry1Ac26 (Accession #FJ617446); Cry1Ac27 (Accession #FJ617447); Cry1Ac28 (Accession #ACM90319); Cry1Ac29 (Accession #DQ438941); Cry1Ac30 (Accession #GQ227507); Cry1Ac31 (Accession #GU446674); Cry1Ac32 (Accession #HM061081); Cry1Ac33 (Accession #GQ866913); Cry1Ac34 (Accession #HQ230364); Cry1Ac35 (Accession #JF340157); Cry1Ac36 (Accession #JN387137); Cry1Ac37 (Accession #JQ317685); Cry1Ad1 (Accession #AAA22340); Cry1Ad2 (Accession #CAA01880); Cry1Ae1 (Accession #AAA22410); Cry1Af1 (Accession #AAB82749); Cry1Ag1 (Accession #AAD46137); Cry1Ah1 (Accession #AAQ14326); Cry1Ah2 (Accession #ABB76664); Cry1Ah3 (Accession #HQ439779); Cry1Ai1 (Accession #AA039719); Cry1Ai2 (Accession #HQ439780); Cry1A-like (Accession #AAK14339); Cry1Ba1 (Accession #CAA29898); Cry1Ba2 (Accession #CAA65003); Cry1Ba3 (Accession #AAK63251); Cry1Ba4 (Accession #AAK51084); Cry1Ba5 (Accession #AB020894); Cry1Ba6 (Accession #ABL60921); Cry1Ba7 (Accession #HQ439781); Cry1Bb1 (Accession #AAA22344); Cry1Bb2 (Accession #HQ439782); Cry1Bc1 (Accession #CAA86568); Cry1Bd1 (Accession #AAD10292); Cry1Bd2 (Accession #AAM93496); Cry1Be1 (Accession #AAC32850); Cry1Be2 (Accession #AAQ52387); Cry1Be3 (Accession #ACV96720); Cry1Be4 (Accession #HM070026); Cry1Bf1 (Accession #CAC50778); Cry1Bf2 (Accession #AAQ52380); Cry1Bg1 (Accession #AA039720); Cry1Bh1 (Accession #HQ589331); Cry1Bi1 (Accession #KC156700); Cry1Ca1 (Accession #CAA30396); Cry1Ca2 (Accession #CAA31951); Cry1Ca3 (Accession #AAA22343); Cry1Ca4 (Accession #CAA01886); Cry1Ca5 (Accession #CAA65457); Cry1Ca6 [1] (Accession #AAF37224); Cry1Ca7 (Accession #AAG50438); Cry1Ca8 (Accession #AAM00264); Cry1Ca9 (Accession #AAL79362); Cry1Ca10 (Accession #AAN16462); Cry1Ca11 (Accession #AAX53094); Cry1Ca12 (Accession #HM070027); Cry1Ca13 (Accession #HQ412621); Cry1Ca14 (Accession #JN651493); Cry1Cb1 (Accession #M97880); Cry1Cb2 (Accession #AAG35409); Cry1Cb3 (Accession #ACD50894); Cry1Cb-like (Accession #AAX63901); Cry1Da1 (Accession #CAA38099); Cry1Da2 (Accession #176415); Cry1Da3 (Accession #HQ439784); Cry1Db1 (Accession #CAA80234); Cry1Db2 (Accession #AAK48937); Cry1Dc1 (Accession #ABK35074); Cry1Ea1 (Accession #CAA37933); Cry1Ea2 (Accession #CAA39609); Cry1Ea3 (Accession #AAA22345); Cry1Ea4 (Accession #AADO4732); Cry1Ea5 (Accession #A15535); Cry1Ea6 (Accession #AAL50330); Cry1Ea7 (Accession #AAW72936); Cry1Ea8 (Accession #ABX11258); Cry1Ea9 (Accession #HQ439785); Cry1Ea10 (Accession #ADR00398); Cry1Ea11 (Accession #JQ652456); Cry1Eb1 (Accession #AAA22346); Cry1Fa1 (Accession #AAA22348); Cry1Fa2 (Accession #AAA22347); Cry1Fa3 (Accession #HM070028); Cry1Fa4 (Accession #HM439638); Cry1Fb1 (Accession #CAA80235); Cry1Fb2 (Accession #BAA25298); Cry1Fb3 (Accession #AAF21767); Cry1Fb4 (Accession #AAC10641); Cry1Fb5 (Accession #AAO13295); Cry1Fb6 (Accession #ACD50892); Cry1Fb7 (Accession #ACD50893); Cry1Ga1 (Accession #CAA80233); Cry1Ga2 (Accession #CAA70506); Cry1Gb1 (Accession #AAD10291); Cry1Gb2 (Accession #AAO13756); Cry1Gc1 (Accession #AAQ52381); Cry1Ha1 (Accession #CAA80236); Cry1Hb1 (Accession #AAA79694); Cry1Hb2 (Accession #HQ439786); Cry1H-like (Accession #AAF01213); Cry1Ia1 (Accession #CAA44633); Cry1Ia2 (Accession #AAA22354); Cry1Ia3 (Accession #AAC36999); Cry1Ia4 (Accession #AAB00958); Cry1Ia5 (Accession #CAA70124); Cry1Ia6 (Accession #AAC26910); Cry1Ia7 (Accession #AAM73516); Cry1Ia8 (Accession #AAK66742); Cry1Ia9 (Accession #AAQ08616); Cry1Ia10 (Accession #AAP86782); Cry1Ia11 (Accession #CAC85964); Cry1Ia12 (Accession #AAV53390); Cry1Ia13 (Accession #ABF83202); Cry1Ia14 (Accession #ACG63871); Cry1Ia15 (Accession #FJ617445); Cry1Ia16 (Accession #FJ617448); Cry1Ia17 (Accession #GU989199); Cry1Ia18 (Accession #ADK23801); Cry1Ia19 (Accession #HQ439787); Cry1Ia20 (Accession #JQ228426); Cry1Ia21 (Accession #JQ228424); Cry1Ia22 (Accession #JQ228427); Cry1Ia23 (Accession #JQ228428); Cry1Ia24 (Accession #JQ228429); Cry1Ia25 (Accession #JQ228430); Cry1Ia26 (Accession #JQ228431); Cry1Ia27 (Accession #JQ228432); Cry1Ia28 (Accession #JQ228433); Cry1Ia29 (Accession #JQ228434); Cry1Ia30 (Accession #JQ317686); Cry1Ia31 (Accession #JX944038); Cry1Ia32 (Accession #JX944039); Cry1Ia33 (Accession #JX944040); Cry1Ib1 (Accession #AAA82114); Cry1Ib2 (Accession #ABW88019); Cry1Ib3 (Accession #ACD75515); Cry1Ib4 (Accession #HM051227); Cry1Ib5 (Accession #HM070028); Cry1Ib6 (Accession #ADK38579); Cry1Ib7 (Accession #JN571740); Cry1Ib8 (Accession #JN675714); Cry1Ib9 (Accession #JN675715); Cry1Ib10 (Accession #JN675716); Cry1Ib11 (Accession #JQ228423); Cry1Ic1 (Accession #AAC62933); Cry1Ic2 (Accession #AAE71691); Cry1Id1 (Accession #AAD44366); Cry1Id2 (Accession #JQ228422); Cry1Ie1 (Accession #AAG43526); Cry1Ie2 (Accession #HM439636); Cry1Ie3 (Accession #KC156647); Cry1Ie4 (Accession #KC156681); Cry1If1 (Accession #AAQ52382); Cry1Ig1 (Accession #KC156701); Cry1I-like (Accession #AAC31094); Cry1I-like (Accession #ABG88859); Cry1Ja1 (Accession #AAA22341); Cry1Ja2 (Accession #HM070030); Cry1Ja3 (Accession #JQ228425); Cry1Jb1 (Accession #AAA98959); Cry1Jc1 (Accession #AAC31092); Cry1Jc2 (Accession #AAQ52372); Cry1Jd1 (Accession #CAC50779); Cry1Ka1 (Accession #AAB00376); Cry1Ka2 (Accession #HQ439783); Cry1La1 (Accession #AAS60191); Cry1La2 (Accession #HM070031); Cry1Ma1 (Accession #FJ884067); Cry1Ma2 (Accession #KC156659); Cry1Na1 (Accession #KC156648); Cry1Nb1 (Accession #KC156678); Cry1-like (Accession #AAC31091); Cry2Aa1 (Accession #AAA22335); Cry2Aa2 (Accession #AAA83516); Cry2Aa3 (Accession #D86064); Cry2Aa4 (Accession #AAC04867); Cry2Aa5 (Accession #CAA10671); Cry2Aa6 (Accession #CAA10672); Cry2Aa7 (Accession #CAA10670); Cry2Aa8 (Accession #AAO13734); Cry2Aa9 (Accession #AAO13750); Cry2Aa10 (Accession #AAQ04263); Cry2Aa11 (Accession #AAQ52384); Cry2Aa12 (Accession #ABI83671); Cry2Aa13 (Accession #ABL01536); Cry2Aa14 (Accession #ACF04939); Cry2Aa15 (Accession #JN426947); Cry2Ab1 (Accession #AAA22342); Cry2Ab2 (Accession #CAA39075); Cry2Ab3 (Accession #AAG36762); Cry2Ab4 (Accession #AAO13296); Cry2Ab5 (Accession #AAQ04609); Cry2Ab6 (Accession #AAP59457); Cry2Ab7 (Accession #AAZ66347); Cry2Ab8 (Accession #ABC95996); Cry2Ab9 (Accession #ABC74968); Cry2Ab10 (Accession #EF157306); Cry2Ab11 (Accession #CAM84575); Cry2Ab12 (Accession #ABM21764); Cry2Ab13 (Accession #ACG76120); Cry2Ab14 (Accession #ACG76121); Cry2Ab15 (Accession #HM037126); Cry2Ab16 (Accession #GQ866914); Cry2Ab17 (Accession #HQ439789); Cry2Ab18 (Accession #JN135255); Cry2Ab19 (Accession #JN135256); Cry2Ab20 (Accession #JN135257); Cry2Ab21 (Accession #JN135258); Cry2Ab22 (Accession #JN135259); Cry2Ab23 (Accession #JN135260); Cry2Ab24 (Accession #JN135261); Cry2Ab25 (Accession #JN415485); Cry2Ab26 (Accession #JN426946); Cry2Ab27 (Accession #JN415764); Cry2Ab28 (Accession #JN651494); Cry2Ac1 (Accession #CAA40536); Cry2Ac2 (Accession #AAG35410); Cry2Ac3 (Accession #AAQ52385); Cry2Ac4 (Accession #ABC95997); Cry2Ac5 (Accession #ABC74969); Cry2Ac6 (Accession #ABC74793); Cry2Ac7 (Accession #CAL18690); Cry2Ac8 (Accession #CAM09325); Cry2Ac9 (Accession #CAM09326); Cry2Ac10 (Accession #ABN15104); Cry2Ac11 (Accession #CAM83895); Cry2Ac12 (Accession #CAM83896); Cry2Ad1 (Accession #AAF09583); Cry2Ad2 (Accession #ABC86927); Cry2Ad3 (Accession #CAK29504); Cry2Ad4 (Accession #CAM32331); Cry2Ad5 (Accession #CA078739); Cry2Ae1 (Accession #AAQ52362); Cry2Af1 (Accession #AB030519); Cry2Af2 (Accession #GQ866915); Cry2Ag1 (Accession #ACH91610); Cry2Ah1 (Accession #EU939453); Cry2Ah2 (Accession #ACL80665); Cry2Ah3 (Accession #GU073380); Cry2Ah4 (Accession #KC156702); Cry2Ai1 (Accession #FJ788388); Cry2Aj (Accession #); Cry2Ak1 (Accession #KC156660); Cry2Ba1 (Accession #KC156658); Cry3Aa1 (Accession #AAA22336); Cry3Aa2 (Accession #AAA22541); Cry3Aa3 (Accession #CAA68482); Cry3Aa4 (Accession #AAA22542); Cry3Aa5 (Accession #AAA50255); Cry3Aa6 (Accession #AAC43266); Cry3Aa7 (Accession #CAB41411); Cry3Aa8 (Accession #AAS79487); Cry3Aa9 (Accession #AAW05659); Cry3Aa10 (Accession #AAU29411); Cry3Aa11 (Accession #AAW82872); Cry3Aa12 (Accession #ABY49136); Cry3Ba1 (Accession #CAA34983); Cry3Ba2 (Accession #CAA00645); Cry3Ba3 (Accession #JQ397327); Cry3Bb1 (Accession #AAA22334); Cry3Bb2 (Accession #AAA74198); Cry3Bb3 (Accession #115475); Cry3Ca1 (Accession #CAA42469); Cry4Aa1 (Accession #CAA68485); Cry4Aa2 (Accession #BAA00179); Cry4Aa3 (Accession #CAD30148); Cry4Aa4 (Accession #AFB18317); Cry4A-like (Accession #AAY96321); Cry4Ba1 (Accession #CAA30312); Cry4Ba2 (Accession #CAA30114); Cry4Ba3 (Accession #AAA22337); Cry4Ba4 (Accession #BAA00178); Cry4Ba5 (Accession #CAD30095); Cry4Ba-like (Accession #ABC47686); Cry4Ca1 (Accession #EU646202); Cry4Cb1 (Accession #FJ403208); Cry4Cb2 (Accession #FJ597622); Cry4Cc1 (Accession #FJ403207); Cry5Aa1 (Accession #AAA67694); Cry5Ab1 (Accession #AAA67693); Cry5Ac1 (Accession #134543); Cry5Ad1 (Accession #ABQ82087); Cry5Ba1 (Accession #AAA68598); Cry5Ba2 (Accession #ABW88931); Cry5Ba3 (Accession #AFJ04417); Cry5Ca1 (Accession #HM461869); Cry5Ca2 (Accession #ZP_04123426); Cry5Da1 (Accession #HM461870); Cry5Da2 (Accession #ZP_04123980); Cry5Ea1 (Accession #HM485580); Cry5Ea2 (Accession #ZP_04124038); Cry6Aa1 (Accession #AAA22357); Cry6Aa2 (Accession #AAM46849); Cry6Aa3 (Accession #ABH03377); Cry6Ba1 (Accession #AAA22358); Cry7Aa1 (Accession #AAA22351); Cry7Ab1 (Accession #AAA21120); Cry7Ab2 (Accession #AAA21121); Cry7Ab3 (Accession #ABX24522); Cry7Ab4 (Accession #EU380678); Cry7Ab5 (Accession #ABX79555); Cry7Ab6 (Accession #ACI44005); Cry7Ab7 (Accession #ADB89216); Cry7Ab8 (Accession #GU145299); Cry7Ab9 (Accession #ADD92572); Cry7Ba1 (Accession #ABB70817); Cry7Bb1 (Accession #KC156653); Cry7Ca1 (Accession #ABR67863); Cry7Cb1 (Accession #KC156698); Cry7Da1 (Accession #ACQ99547); Cry7Da2 (Accession #HM572236); Cry7Da3 (Accession #KC156679); Cry7Ea1 (Accession #HM035086); Cry7Ea2 (Accession #HM132124); Cry7Ea3 (Accession #EEM19403); Cry7Fa1 (Accession #HM035088); Cry7Fa2 (Accession #EEM19090); Cry7Fb1 (Accession #HM572235); Cry7Fb2 (Accession #KC156682); Cry7Ga1 (Accession #HM572237); Cry7Ga2 (Accession #KC156669); Cry7Gb1 (Accession #KC156650); Cry7Gc1 (Accession #KC156654); Cry7Gd1 (Accession #KC156697); Cry7Ha1 (Accession #KC156651); Cry7Ia1 (Accession #KC156665); Cry7Ja1 (Accession #KC156671); Cry7Ka1 (Accession #KC156680); Cry7Kb1 (Accession #BAM99306); Cry7La1 (Accession #BAM99307); Cry8Aa1 (Accession #AAA21117); Cry8Ab1 (Accession #EU044830); Cry8Ac1 (Accession #KC156662); Cry8Ad1 (Accession #KC156684); Cry8Ba1 (Accession #AAA21118); Cry8Bb1 (Accession #CAD57542); Cry8Bc1 (Accession #CAD57543); Cry8Ca1 (Accession #AAA21119); Cry8Ca2 (Accession #AAR98783); Cry8Ca3 (Accession #EU625349); Cry8Ca4 (Accession #ADB54826); Cry8Da1 (Accession #BAC07226); Cry8Da2 (Accession #BD133574); Cry8Da3 (Accession #BD133575); Cry8Db1 (Accession #BAF93483); Cry8Ea1 (Accession #AAQ73470); Cry8Ea2 (Accession #EU047597); Cry8Ea3 (Accession #KC855216); Cry8Fa1 (Accession #AAT48690); Cry8Fa2 (Accession #HQ174208); Cry8Fa3 (Accession #AFH78109); Cry8Ga1 (Accession #AAT46073); Cry8Ga2 (Accession #ABC42043); Cry8Ga3 (Accession #FJ198072); Cry8Ha1 (Accession #AAW81032); Cry8Ia1 (Accession #EU381044); Cry8Ia2 (Accession #GU073381); Cry8Ia3 (Accession #HM044664); Cry8Ia4 (Accession #KC156674); Cry8Ib1 (Accession #GU325772); Cry8Ib2 (Accession #KC156677); Cry8Ja1 (Accession #EU625348); Cry8Ka1 (Accession #FJ422558); Cry8Ka2 (Accession #ACN87262); Cry8Kb1 (Accession #HM123758); Cry8Kb2 (Accession #KC156675); Cry8La1 (Accession #GU325771); Cry8Ma1 (Accession #HM044665); Cry8Ma2 (Accession #EEM86551); Cry8Ma3 (Accession #HM210574); Cry8Na1 (Accession #HM640939); Cry8Pa1 (Accession #HQ388415); Cry8Qa1 (Accession #HQ441166); Cry8Qa2 (Accession #KC152468); Cry8Ra1 (Accession #AFP87548); Cry8Sa1 (Accession #JQ740599); Cry8Ta1 (Accession #KC156673); Cry8-like (Accession #FJ770571); Cry8-like (Accession #ABS53003); Cry9Aa1 (Accession #CAA41122); Cry9Aa2 (Accession #CAA41425); Cry9Aa3 (Accession #GQ249293); Cry9Aa4 (Accession #GQ249294); Cry9Aa5 (Accession #JX174110); Cry9Aa like (Accession #AAQ52376); Cry9Ba1 (Accession #CAA52927); Cry9Ba2 (Accession #GU299522); Cry9Bb1 (Accession #AAV28716); Cry9Ca1 (Accession #CAA85764); Cry9Ca2 (Accession #AAQ52375); Cry9Da1 (Accession #BAA19948); Cry9Da2 (Accession #AAB97923); Cry9Da3 (Accession #GQ249293); Cry9Da4 (Accession #GQ249297); Cry9Db1 (Accession #AAX78439); Cry9Dc1 (Accession #KC156683); Cry9Ea1 (Accession #BAA34908); Cry9Ea2 (Accession #AAO12908); Cry9Ea3 (Accession #ABM21765); Cry9Ea4 (Accession #ACE88267); Cry9Ea5 (Accession #ACF04743); Cry9Ea6 (Accession #ACG63872); Cry9Ea7 (Accession #FJ380927); Cry9Ea8 (Accession #GQ249292); Cry9Ea9 (Accession #JN651495); Cry9Eb1 (Accession #CAC50780); Cry9Eb2 (Accession #GQ249298); Cry9Eb3 (Accession #KC156646); Cry9Ec1 (Accession #AAC63366); Cry9Ed1 (Accession #AAX78440); Cry9Ee1 (Accession #GQ249296); Cry9Ee2 (Accession #KC156664); Cry9Fa1 (Accession #KC156692); Cry9Ga1 (Accession #KC156699); Cry9-like (Accession #AAC63366); Cry10Aa1 (Accession #AAA22614); Cry10Aa2 (Accession #E00614); Cry10Aa3 (Accession #CAD30098); Cry10Aa4 (Accession #AFB18318); Cry10A-like (Accession #DQ167578); Cry11Aa1 (Accession #AAA22352); Cry11Aa2 (Accession #AAA22611); Cry11Aa3 (Accession #CAD30081); Cry11Aa4 (Accession #AFB18319); Cry11Aa-like (Accession #DQ166531); Cry11Ba1 (Accession #CAA60504); Cry11Bb1 (Accession #AAC97162); Cry11Bb2 (Accession #HM068615); Cry12Aa1 (Accession #AAA22355); Cry13Aa1 (Accession #AAA22356); Cry14Aa1 (Accession #AAA21516); Cry14Ab1 (Accession #KC156652); Cry15Aa1 (Accession #AAA22333); Cry16Aa1 (Accession #CAA63860); Cry17Aa1 (Accession #CAA67841); Cry18Aa1 (Accession #CAA67506); Cry18Ba1 (Accession #AAF89667); Cry18Ca1 (Accession #AAF89668); Cry19Aa1 (Accession #CAA68875); Cry19Ba1 (Accession #BAA32397); Cry19Ca1 (Accession #AFM37572); Cry20Aa1 (Accession #AAB93476); Cry20Ba1 (Accession #ACS93601); Cry20Ba2 (Accession #KC156694); Cry20-like (Accession #GQ144333); Cry21Aa1 (Accession #132932); Cry21Aa2 (Accession #166477); Cry21Ba1 (Accession #BAC06484); Cry21Ca1 (Accession #JF521577); Cry21Ca2 (Accession #KC156687); Cry21Da1 (Accession #JF521578); Cry22Aa1 (Accession #134547); Cry22Aa2 (Accession #CAD43579); Cry22Aa3 (Accession #ACD93211); Cry22Ab1 (Accession #AAK50456); Cry22Ab2 (Accession #CAD43577); Cry22Ba1 (Accession #CAD43578); Cry22Bb1 (Accession #KC156672); Cry23Aa1 (Accession #AAF76375); Cry24Aa1 (Accession #AAC61891); Cry24Ba1 (Accession #BAD32657); Cry24Ca1 (Accession #CAJ43600); Cry25Aa1 (Accession #AAC61892); Cry26Aa1 (Accession #AAD25075); Cry27Aa1 (Accession #BAA82796); Cry28Aa1 (Accession #AAD24189); Cry28Aa2 (Accession #AAG00235); Cry29Aa1 (Accession #CAC80985); Cry30Aa1 (Accession #CAC80986); Cry30Ba1 (Accession #BADO0052); Cry30Ca1 (Accession #BAD67157); Cry30Ca2 (Accession #ACU24781); Cry30Da1 (Accession #EF095955); Cry30Db1 (Accession #BAE80088); Cry30Ea1 (Accession #ACC95445); Cry30Ea2 (Accession #FJ499389); Cry30Fa1 (Accession #ACI22625); Cry30Ga1 (Accession #ACG60020); Cry30Ga2 (Accession #HQ638217); Cry31Aa1 (Accession #BAB11757); Cry31Aa2 (Accession #AAL87458); Cry31Aa3 (Accession #BAE79808); Cry31Aa4 (Accession #BAF32571); Cry31Aa5 (Accession #BAF32572); Cry31Aa6 (Accession #BAI44026); Cry31Ab1 (Accession #BAE79809); Cry31Ab2 (Accession #BAF32570); Cry31Ac1 (Accession #BAF34368); Cry31Ac2 (Accession #AB731600); Cry31Ad1 (Accession #BAI44022); Cry32Aa1 (Accession #AAG36711); Cry32Aa2 (Accession #GU063849); Cry32Ab1 (Accession #GU063850); Cry32Ba1 (Accession #BAB78601); Cry32Ca1 (Accession #BAB78602); Cry32Cb1 (Accession #KC156708); Cry32Da1 (Accession #BAB78603); Cry32Ea1 (Accession #GU324274); Cry32Ea2 (Accession #KC156686); Cry32Eb1 (Accession #KC156663); Cry32Fa1 (Accession #KC156656); Cry32Ga1 (Accession #KC156657); Cry32Ha1 (Accession #KC156661); Cry32Hb1 (Accession #KC156666); Cry32Ia1 (Accession #KC156667); Cry32Ja1 (Accession #KC156685); Cry32Ka1 (Accession #KC156688); Cry32La1 (Accession #KC156689); Cry32Ma1 (Accession #KC156690); Cry32Mb1 (Accession #KC156704); Cry32Na1 (Accession #KC156691); Cry32Oa1 (Accession #KC156703); Cry32Pa1 (Accession #KC156705); Cry32Qa1 (Accession #KC156706); Cry32Ra1 (Accession #KC156707); Cry32Sa1 (Accession #KC156709); Cry32Ta1 (Accession #KC156710); Cry32Ua1 (Accession #KC156655); Cry33Aa1 (Accession #AAL26871); Cry34Aa1 (Accession #AAG50341); Cry34Aa2 (Accession #AAK64560); Cry34Aa3 (Accession #AAT29032); Cry34Aa4 (Accession #AAT29030); Cry34Ab1 (Accession #AAG41671); Cry34Ac1 (Accession #AAG50118); Cry34Ac2 (Accession #AAK64562); Cry34Ac3 (Accession #AAT29029); Cry34Ba1 (Accession #AAK64565); Cry34Ba2 (Accession #AAT29033); Cry34Ba3 (Accession #AAT29031); Cry35Aa1 (Accession #AAG50342); Cry35Aa2 (Accession #AAK64561); Cry35Aa3 (Accession #AAT29028); Cry35Aa4 (Accession #AAT29025); Cry35Ab1 (Accession #AAG41672); Cry35Ab2 (Accession #AAK64563); Cry35Ab3 (Accession #AY536891); Cry35Ac1 (Accession #AAG50117); Cry35Ba1 (Accession #AAK64566); Cry35Ba2 (Accession #AAT29027); Cry35Ba3 (Accession #AAT29026); Cry36Aa1 (Accession #AAK64558); Cry37Aa1 (Accession #AAF76376); Cry38Aa1 (Accession #AAK64559); Cry39Aa1 (Accession #BAB72016); Cry40Aa1 (Accession #BAB72018); Cry40Ba1 (Accession #BAC77648); Cry40Ca1 (Accession #EU381045); Cry40Da1 (Accession #ACF15199); Cry41Aa1 (Accession #BAD35157); Cry41Ab1 (Accession #BAD35163); Cry41Ba1 (Accession #HM461871); Cry41Ba2 (Accession #ZP_04099652); Cry42Aa1 (Accession #BAD35166); Cry43Aa1 (Accession #BAD15301); Cry43Aa2 (Accession #BAD95474); Cry43Ba1 (Accession #BAD15303); Cry43Ca1 (Accession #KC156676); Cry43Cb1 (Accession #KC156695); Cry43Cc1 (Accession #KC156696); Cry43-like (Accession #BAD15305); Cry44Aa (Accession #BADO8532); Cry45Aa (Accession #BAD22577); Cry46Aa (Accession #BAC79010); Cry46Aa2 (Accession #BAG68906); Cry46Ab (Accession #BAD35170); Cry47Aa (Accession #AAY24695); Cry48Aa (Accession #CAJ18351); Cry48Aa2 (Accession #CAJ86545); Cry48Aa3 (Accession #CAJ86546); Cry48Ab (Accession #CAJ86548); Cry48Ab2 (Accession #CAJ86549); Cry49Aa (Accession #CAH56541); Cry49Aa2 (Accession #CAJ86541); Cry49Aa3 (Accession #CAJ86543); Cry49Aa4 (Accession #CAJ86544); Cry49Ab1 (Accession #CAJ86542); Cry50Aa1 (Accession #BAE86999); Cry50Ba1 (Accession #GU446675); Cry50Ba2 (Accession #GU446676); Cry51Aa1 (Accession #ABI14444); Cry51Aa2 (Accession #GU570697); Cry52Aa1 (Accession #EF613489); Cry52Ba1 (Accession #FJ361760); Cry53Aa1 (Accession #EF633476); Cry53Ab1 (Accession #FJ361759); Cry54Aa1 (Accession #ACA52194); Cry54Aa2 (Accession #GQ140349); Cry54Ba1 (Accession #GU446677); Cry55Aa1 (Accession #ABW88932); Cry54Ab1 (Accession #JQ916908); Cry55Aa2 (Accession #AAE33526); Cry56Aa1 (Accession #ACU57499); Cry56Aa2 (Accession #GQ483512); Cry56Aa3 (Accession #JX025567); Cry57Aa1 (Accession #ANC87261); Cry58Aa1 (Accession #ANC87260); Cry59Ba1 (Accession #JN790647); Cry59Aa1 (Accession #ACR43758); Cry60Aa1 (Accession #ACU24782); Cry60Aa2 (Accession #EAO57254); Cry60Aa3 (Accession #EEM99278); Cry60Ba1 (Accession #GU810818); Cry60Ba2 (Accession #EAO57253); Cry60Ba3 (Accession #EEM99279); Cry61Aa1 (Accession #HM035087); Cry61Aa2 (Accession #HM132125); Cry61Aa3 (Accession #EEM19308); Cry62Aa1 (Accession #HM054509); Cry63Aa1 (Accession #BAI44028); Cry64Aa1 (Accession #BAJ05397); Cry65Aa1 (Accession #HM461868); Cry65Aa2 (Accession #ZP_04123838); Cry66Aa1 (Accession #HM485581); Cry66Aa2 (Accession #ZP_04099945); Cry67Aa1 (Accession #HM485582); Cry67Aa2 (Accession #ZP_04148882); Cry68Aa1 (Accession #HQ113114); Cry69Aa1 (Accession #HQ401006); Cry69Aa2 (Accession #JQ821388); Cry69Ab1 (Accession #JN209957); Cry70Aa1 (Accession #JN646781); Cry70Ba1 (Accession #ADO51070); Cry70Bb1 (Accession #EEL67276); Cry71Aa1 (Accession #JX025568); Cry72Aa1 (Accession #JX025569).

[0149] Examples of δ-endotoxins also include but are not limited to Cry1A proteins of U.S. Pat. Nos. 5,880,275 and 7,858,849; a DIG-3 or DIG-11 toxin (N-terminal deletion of α-helix 1 and/or α-helix 2 variants of Cry proteins such as Cry1A) of U.S. Pat. Nos. 8,304,604 and 8,304,605, Cry1B of U.S. patent application Ser. No. 10/525,318; Cry1C of U.S. Pat. No. 6,033,874; Cry1F of U.S. Pat. Nos. 5,188,960, 6,218,188; Cry1A/F chimeras of U.S. Pat. Nos. 7,070,982; 6,962,705 and 6,713,063); a Cry2 protein such as Cry2Ab protein of U.S. Pat. No. 7,064,249); a Cry3A protein including but not limited to an engineered hybrid insecticidal protein (eHIP) created by fusing unique combinations of variable regions and conserved blocks of at least two different Cry proteins (US Patent Application Publication Number 2010/0017914); a Cry4 protein; a Cry5 protein; a Cry6 protein; Cry8 proteins of U.S. Pat. Nos. 7,329,736, 7,449,552, 7,803,943, 7,476,781, 7,105,332, 7,378,499 and 7,462,760; a Cry9 protein such as such as members of the Cry9A, Cry9B, Cry9C, Cry9D, Cry9E, and Cry9F families; a Cry15 protein of Naimov, et al., (2008) Applied and Environmental Microbiology 74:7145-7151; a Cry22, a Cry34Ab1 protein of U.S. Pat. Nos. 6,127,180, 6,624,145 and 6,340,593; a CryET33 and CryET34 protein of U.S. Pat. Nos. 6,248,535, 6,326,351, 6,399,330, 6,949,626, 7,385,107 and 7,504,229; a CryET33 and CryET34 homologs of US Patent Publication Number 2006/0191034, 2012/0278954, and PCT Publication Number WO 2012/139004; a Cry35Ab1 protein of U.S. Pat. Nos. 6,083,499, 6,548,291 and 6,340,593; a Cry46 protein, a Cry 51 protein, a Cry binary toxin; a TIC901 or related toxin; TIC807 of US 2008/0295207; ET29, ET37, TIC809, TIC810, TIC812, TIC127, TIC128 of PCT US 2006/033867; TIC1100, TIC 860, a TIC867, a TIC868, TIC869, and TIC836 of US Patent Publication Number 2016/0108428. AXMI-027, AXMI-036, and AXMI-038 of U.S. Pat. No. 8,236,757; AXMI-031, AXMI-039, AXMI-040, AXMI-049 of U.S. Pat. No. 7,923,602; AXMI-018, AXMI-020, and AXMI-021 of WO 2006/083891; AXMI-010 of WO 2005/038032; AXMI-003 of WO 2005/021585; AXMI-008 of US 2004/0250311; AXMI-006 of US 2004/0216186; AXMI-007 of US 2004/0210965; AXMI-009 of US 2004/0210964; AXMI-014 of US 2004/0197917; AXMI-004 of US 2004/0197916; AXMI-028 and AXMI-029 of WO 2006/119457; AXMI-007, AXMI-008, AXMI-0080rf2, AXMI-009, AXMI-014 and AXMI-004 of WO 2004/074462; AXMI-150 of U.S. Pat. No. 8,084,416; AXMI-205 of US20110023184; AXMI-011, AXMI-012, AXMI-013, AXMI-015, AXMI-019, AXMI-044, AXMI-037, AXMI-043, AXMI-033, AXMI-034, AXMI-022, AXMI-023, AXMI-041, AXMI-063, and AXMI-064 of US 2011/0263488; AXMI-R1 and related proteins of US 2010/0197592; AXMI221Z, AXMI222z, AXMI223z, AXMI224z and AXMI225z of WO 2011/103248; AXMI218, AXMI219, AXMI220, AXMI226, AXMI227, AXMI228, AXMI229, AXMI230, and AXMI231 of WO11/103247; AXMI-115, AXMI-113, AXMI-005, AXMI-163 and AXMI-184 of U.S. Pat. No. 8,334,431; AXMI-001, AXMI-002, AXMI-030, AXMI-035, and AXMI-045 of US 2010/0298211; AXMI-066 and AXMI-076 of US20090144852; AXMI128, AXMI130, AXMI131, AXMI133, AXMI140, AXMI141, AXMI142, AXMI143, AXMI144, AXMI146, AXMI148, AXMI149, AXMI152, AXMI153, AXMI154, AXMI155, AXMI156, AXMI157, AXMI158, AXMI162, AXMI165, AXMI166, AXMI167, AXMI168, AXMI169, AXMI170, AXMI171, AXMI172, AXMI173, AXMI174, AXMI175, AXMI176, AXMI177, AXMI178, AXMI179, AXMI180, AXMI181, AXMI182, AXMI185, AXMI186, AXMI187, AXMI188, AXMI189 of U.S. Pat. No. 8,318,900; AXMI079, AXMI080, AXMI081, AXMI082, AXMI091, AXMI092, AXMI096, AXMI097, AXMI098, AXMI099, AXMI100, AXMI101, AXMI102, AXMI103, AXMI104, AXMI107, AXMI108, AXMI109, AXMI110, AXMI111, AXMI112, AXMI114, AXMI116, AXMI117, AXMI118, AXMI119, AXMI120, AXMI121, AXMI122, AXMI123, AXMI124, AXMI1257, AXMI1268, AXMI127, AXMI129, AXMI164, AXMI151, AXMI161, AXMI183, AXMI132, AXMI138, AXMI137 of US 2010/0005543; and Cry proteins such as Cry1A and Cry3A having modified proteolytic sites of U.S. Pat. No. 8,319,019; a Cry1Ac, Cry2Aa and Cry1Ca toxin protein from Bacillus thuringiensis strain VBTS 2528 of US Patent Application Publication Number 2011/0064710, and an IP1B of PCT publication number WO 2016/061197. Other Cry proteins are well known to one skilled in the art (see, Crickmore, et al., “Bacillus thuringiensis toxin nomenclature” (2011), at lifesci.sussex.ac.uk/home/Neil_Crickmore/Bt/ which can be accessed on the world-wide web using the “www” prefix). The insecticidal activity of Cry proteins is well known to one skilled in the art (for review, see, van Frannkenhuyzen, (2009) J. Invert. Path. 101:1-16). The use of Cry proteins as transgenic plant traits is well known to one skilled in the art and Cry-transgenic plants including but not limited to Cry1Ac, Cry1Ac+Cry2Ab, Cry1Ab, Cry1A.105, Cry1F, Cry1Fa2, Cry1F+Cry1Ac, Cry2Ab, Cry3A, mCry3A, Cry3Bb1, Cry34Ab1, Cry35Ab1, Vip3A, mCry3A, Cry9c and CBI-Bt have received regulatory approval (see, Sanahuja, (2011) Plant Biotech Journal 9:283-300 and the CERA (2010) GM Crop Database Center for Environmental Risk Assessment (CERA), ILSI Research Foundation, Washington D.C. at cera-gmc.org/index.php?action=gm_crop_database which can be accessed on the world-wide web using the “www” prefix). More than one pesticidal proteins well known to one skilled in the art can also be expressed in plants such as Vip3Ab & Cry1Fa (US2012/0317682), Cry1BE & Cry1F (US2012/0311746), Cry1CA & Cry1AB (US2012/0311745), Cry1F & CryCa (US2012/0317681), Cry1DA & Cry1BE (US2012/0331590), Cry1DA & Cry1Fa (US2012/0331589), Cry1AB & Cry1BE (US2012/0324606), and Cry1Fa & Cry2Aa, Cry11 or Cry1E (US2012/0324605)); Cry34Ab/35Ab and Cry6Aa (US20130167269); Cry34Ab/VCry35Ab & Cry3Aa (US20130167268); Cry3A and Cry1Ab or Vip3Aa (US20130116170); and Cry1F, Cry34Ab1, and Cry35Ab1 (PCT/US2010/060818). Pesticidal proteins also include insecticidal lipases including lipid acyl hydrolases of U.S. Pat. No. 7,491,869, and cholesterol oxidases such as from Streptomyces (Purcell et al. (1993) Biochem Biophys Res Commun 15:1406-1413). Pesticidal proteins also include VIP (vegetative insecticidal proteins) toxins of U.S. Pat. Nos. 5,877,012, 6,107,279, 6,137,033, 7,244,820, 7,615,686, and 8,237,020, and the like. Other VIP proteins are well known to one skilled in the art (see, lifesci.sussex.ac.uk/home/Neil_Crickmore/Bt/vip.html which can be accessed on the world-wide web using the “www” prefix). Pesticidal proteins also include toxin complex (TC) proteins, obtainable from organisms such as Xenorhabdus, Photorhabdus and Paenibacillus (see, U.S. Pat. Nos. 7,491,698 and 8,084,418). Some TC proteins have “stand alone” insecticidal activity and other TC proteins enhance the activity of the stand-alone toxins produced by the same given organism. The toxicity of a “stand-alone” TC protein (from Photorhabdus, Xenorhabdus or Paenibacillus, for example) can be enhanced by one or more TC protein “potentiators” derived from a source organism of a different genus. There are three main types of TC proteins. As referred to herein, Class A proteins (“Protein A”) are stand-alone toxins. Class B proteins (“Protein B”) and Class C proteins (“Protein C”) enhance the toxicity of Class A proteins. Examples of Class A proteins are TcbA, TcdA, XptA1 and XptA2. Examples of Class B proteins are TcaC, TcdB, XptB1Xb and XptC1Wi. Examples of Class C proteins are TccC, XptC1Xb and XptB1Wi. Pesticidal proteins also include spider, snake and scorpion venom proteins. Examples of spider venom peptides include but are not limited to lycotoxin-1 peptides and mutants thereof (U.S. Pat. No. 8,334,366).

[0150] (C) A polynucleotide encoding an insect-specific hormone or pheromone such as an ecdysteroid and juvenile hormone, a variant thereof, a mimetic based thereon or an antagonist or agonist thereof. See, for example, the disclosure by Hammock, et al., (1990) Nature 344:458, of baculovirus expression of cloned juvenile hormone esterase, an inactivator of juvenile hormone.

[0151] (D) A polynucleotide encoding an insect-specific peptide which, upon expression, disrupts the physiology of the affected pest. For example, see the disclosures of, Regan, (1994) J. Biol. Chem. 269:9 (expression cloning yields DNA coding for insect diuretic hormone receptor); Pratt, et al., (1989) Biochem. Biophys. Res. Comm. 163:1243 (an allostatin is identified in Diploptera puntata); Chattopadhyay, et al., (2004) Critical Reviews in Microbiology 30(1):33-54; Zjawiony, (2004) J Nat Prod 67(2):300-310; Carlini and Grossi-de-Sa, (2002) Toxicon 40(11):1515-1539; Ussuf, et al., (2001) Curr Sci. 80(7):847-853 and Vasconcelos and Oliveira, (2004) Toxicon 44(4):385-403. See also, U.S. Pat. No. 5,266,317 to Tomalski, et al., who disclose genes encoding insect-specific toxins.

[0152] (E) A polynucleotide encoding an enzyme responsible for a hyperaccumulation of a monoterpene, a sesquiterpene, a steroid, hydroxamic acid, a phenylpropanoid derivative or another non-protein molecule with insecticidal activity.

[0153] (F) A polynucleotide encoding an enzyme involved in the modification, including the post-translational modification, of a biologically active molecule; for example, a glycolytic enzyme, a proteolytic enzyme, a lipolytic enzyme, a nuclease, a cyclase, a transaminase, an esterase, a hydrolase, a phosphatase, a kinase, a phosphorylase, a polymerase, an elastase, a chitinase and a glucanase, whether natural or synthetic. See, PCT Application WO 1993/02197 in the name of Scott, et al., which discloses the nucleotide sequence of a callase gene. DNA molecules which contain chitinase-encoding sequences can be obtained, for example, from the ATCC under Accession Numbers 39637 and 67152. See also, Kramer, et al., (1993) Insect Biochem. Molec. Biol. 23:691, who teach the nucleotide sequence of a cDNA encoding tobacco hookworm chitinase and Kawalleck, et al., (1993) Plant Molec. Biol. 21:673, who provide the nucleotide sequence of the parsley ubi4-2 polyubiquitin gene, and U.S. Pat. Nos. 6,563,020; 7,145,060 and 7,087,810.

[0154] (G) A polynucleotide encoding a molecule that stimulates signal transduction. For example, see the disclosure by Botella, et al., (1994) Plant Molec. Biol. 24:757, of nucleotide sequences for mung bean calmodulin cDNA clones, and Griess, et al., (1994) Plant Physiol. 104:1467, who provide the nucleotide sequence of a maize calmodulin cDNA clone.

[0155] (H) A polynucleotide encoding a hydrophobic moment peptide. See, PCT Application WO 1995/16776 and U.S. Pat. No. 5,580,852 disclosure of peptide derivatives of Tachyplesin which inhibit fungal plant pathogens) and PCT Application WO 1995/18855 and U.S. Pat. No. 5,607,914 (teaches synthetic antimicrobial peptides that confer disease resistance).

[0156] (I) A polynucleotide encoding a membrane permease, a channel former or a channel blocker. For example, see the disclosure by Jaynes, et al., (1993) Plant Sci. 89:43, of heterologous expression of a cecropin-beta lytic peptide analog to render transgenic tobacco plants resistant to Pseudomonas solanacearum.

[0157] (J) A gene encoding a viral-invasive protein or a complex toxin derived therefrom. For example, the accumulation of viral coat proteins in transformed plant cells imparts resistance to viral infection and/or disease development effected by the virus from which the coat protein gene is derived, as well as by related viruses. See, Beachy, et al., (1990) Ann. Rev. Phytopathol. 28:451. Coat protein-mediated resistance has been conferred upon transformed plants against alfalfa mosaic virus, cucumber mosaic virus, tobacco streak virus, potato virus X, potato virus Y, tobacco etch virus, tobacco rattle virus and tobacco mosaic virus. Id.

[0158] (K) A gene encoding an insect-specific antibody or an immunotoxin derived therefrom. Thus, an antibody targeted to a critical metabolic function in the insect gut would inactivate an affected enzyme, killing the insect. Cf. Taylor, et al., Abstract #497, SEVENTH INT'L SYMPOSIUM ON MOLECULAR PLANT-MICROBE INTERACTIONS (Edinburgh, Scotland, 1994) (enzymatic inactivation in transgenic tobacco via production of single-chain antibody fragments).

[0159] (L) A gene encoding a virus-specific antibody. See, for example, Tavladoraki, et al., (1993) Nature 366:469, who show that transgenic plants expressing recombinant antibody genes are protected from virus attack.

[0160] (M) A polynucleotide encoding a developmental-arrestive protein produced in nature by a pathogen or a parasite. Thus, fungal endo alpha-1,4-D-polygalacturonases facilitate fungal colonization and plant nutrient release by solubilizing plant cell wall homo-alpha-1,4-D-galacturonase. See, Lamb, et al., (1992) Bio/Technology 10:1436. The cloning and characterization of a gene which encodes a bean endopolygalacturonase-inhibiting protein is described by Toubart, et al., (1992) Plant J. 2:367.

[0161] (N) A polynucleotide encoding a developmental-arrestive protein produced in nature by a plant. For example, Logemann, et al., (1992) Bio/Technology 10:305, have shown that transgenic plants expressing the barley ribosome-inactivating gene have an increased resistance to fungal disease.

[0162] (O) Genes involved in the Systemic Acquired Resistance (SAR) Response and/or the pathogenesis related genes. Briggs, (1995) Current Biology 5(2), Pieterse and Van Loon, (2004) Curr. Opin. Plant Bio. 7(4):456-64 and Somssich, (2003) Cell 113(7):815-6.

[0163] (P) Antifungal genes (Cornelissen and Melchers, (1993) Pl. Physiol. 101:709-712 and Parijs, et al., (1991) Planta 183:258-264 and Bushnell, et al., (1998) Can. J. of Plant Path. 20(2):137-149. Also see, U.S. patent application Ser. Nos. 09/950,933; 11/619,645; 11/657,710; 11/748,994; 11/774,121 and U.S. Pat. Nos. 6,891,085 and 7,306,946. LysM Receptor-like kinases for the perception of chitin fragments as a first step in plant defense response against fungal pathogens (US 2012/0110696).

[0164] (Q) Detoxification genes, such as for fumonisin, beauvericin, moniliformin and zearalenone and their structurally related derivatives. For example, see, U.S. Pat. Nos. 5,716,820; 5,792,931; 5,798,255; 5,846,812; 6,083,736; 6,538,177; 6,388,171 and 6,812,380.

[0165] (R) A polynucleotide encoding a Cystatin and cysteine proteinase inhibitors. See, U.S. Pat. No. 7,205,453.

[0166] (S) Defensin genes. See, WO 2003/000863 and U.S. Pat. Nos. 6,911,577; 6,855,865; 6,777,592 and 7,238,781.

[0167] (T) Genes conferring resistance to nematodes. See, e.g., PCT Application WO 1996/30517; PCT Application WO 1993/19181, WO 2003/033651 and Urwin, et al., (1998) Planta 204:472-479, Williamson, (1999) Curr Opin Plant Bio. 2(4):327-31; U.S. Pat. Nos. 6,284,948 and 7,301,069 and miR164 genes (WO 2012/058266).

[0168] (U) Genes that confer resistance to Phytophthora Root Rot, such as the Rps 1, Rps 1-a, Rps 1-b, Rps 1-c, Rps 1-d, Rps 1-e, Rps 1-k, Rps 2, Rps 3-a, Rps 3-b, Rps 3-c, Rps 4, Rps 5, Rps 6, Rps 7 and other Rps genes. See, for example, Shoemaker, et al., Phytophthora Root Rot Resistance Gene Mapping in Soybean, Plant Genome IV Conference, San Diego, Calif. (1995).

[0169] (V) Genes that confer resistance to Brown Stem Rot, such as described in U.S. Pat. No. 5,689,035 and incorporated by reference for this purpose.

[0170] (W) Genes that confer resistance to Colletotrichum, such as described in US Patent Application Publication US 2009/0035765 and incorporated by reference for this purpose. This includes the Rcg locus that may be utilized as a single locus conversion.

[0171] (X) Some embodiments relate to down-regulation of expression of target genes in insect pest species by interfering ribonucleic acid (RNA) molecules. PCT Publication WO 2007/074405 describes methods of inhibiting expression of target genes in invertebrate pests including Colorado potato beetle. PCT Publication WO 2005/110068 describes methods of inhibiting expression of target genes in invertebrate pests including in particular Western corn rootworm as a means to control insect infestation. Furthermore, PCT Publication WO 2009/091864 describes compositions and methods for the suppression of target genes from insect pest species including pests from the Lygus genus.

[0172] Nucleic acid molecules including silencing elements for targeting the vacuolar ATPase H subunit, useful for controlling a coleopteran pest population and infestation as described in US Patent Application Publication 2012/0198586. PCT Publication WO 2012/055982 describes ribonucleic acid (RNA or double stranded RNA) that inhibits or down regulates the expression of a target gene that encodes: an insect ribosomal protein such as the ribosomal protein L19, the ribosomal protein L40 or the ribosomal protein S27A; an insect proteasome subunit such as the Rpn6 protein, the Pros 25, the Rpn2 protein, the proteasome beta 1 subunit protein or the Pros beta 2 protein; an insect β-coatomer of the COPI vesicle, the γ-coatomer of the COPI vesicle, the β′-coatomer protein or the ζ-coatomer of the COPI vesicle; an insect Tetraspanine 2 A protein which is a putative transmembrane domain protein; an insect protein belonging to the actin family such as Actin 5C; an insect ubiquitin-5E protein; an insect Sec23 protein which is a GTPase activator involved in intracellular protein transport; an insect crinkled protein which is an unconventional myosin which is involved in motor activity; an insect crooked neck protein which is involved in the regulation of nuclear alternative mRNA splicing; an insect vacuolar H+-ATPase G-subunit protein and an insect Tbp-1 such as Tat-binding protein. PCT publication WO 2007/035650 describes ribonucleic acid (RNA or double stranded RNA) that inhibits or down regulates the expression of a target gene that encodes Snf7. US Patent Application publication 2011/0054007 describes polynucleotide silencing elements targeting RPS10. US Patent Application publication 2014/0275208 and US2015/0257389 describe polynucleotide silencing elements targeting RyanR and PAT3. PCT publications WO 2016/060911, WO 2016/060912, WO 2016/060913, and WO 2016/060914 describe polynucleotide silencing elements targeting COPI coatomer subunit nucleic acid molecules that confer resistance to Coleopteran and Hemipteran pests. US Patent Application Publications 2012/029750, US 20120297501, and 2012/0322660 describe interfering ribonucleic acids (RNA or double stranded RNA) that functions upon uptake by an insect pest species to down-regulate expression of a target gene in said insect pest, wherein the RNA comprises at least one silencing element wherein the silencing element is a region of double-stranded RNA comprising annealed complementary strands, one strand of which comprises or consists of a sequence of nucleotides which is at least partially complementary to a target nucleotide sequence within the target gene. US Patent Application Publication 2012/0164205 describe potential targets for interfering double stranded ribonucleic acids for inhibiting invertebrate pests including: a Chd3 Homologous Sequence, a Beta-Tubulin Homologous Sequence, a 40 kDa V-ATPase Homologous Sequence, a EF1α Homologous Sequence, a 26S Proteosome Subunit p28 Homologous Sequence, a Juvenile Hormone Epoxide Hydrolase Homologous Sequence, a Swelling Dependent Chloride Channel Protein Homologous Sequence, a Glucose-6-Phosphate 1-Dehydrogenase Protein Homologous Sequence, an Act42A Protein Homologous Sequence, a ADP-Ribosylation Factor 1 Homologous Sequence, a Transcription Factor IIB Protein Homologous Sequence, a Chitinase Homologous Sequences, a Ubiquitin Conjugating Enzyme Homologous Sequence, a Glyceraldehyde-3-Phosphate Dehydrogenase Homologous Sequence, an Ubiquitin B Homologous Sequence, a Juvenile Hormone Esterase Homolog, and an Alpha Tubuliln Homologous Sequence.

[0173] ii. Transgenes that Confer Resistance to a Herbicide.

[0174] (A) A polynucleotide encoding resistance to a herbicide that inhibits the growing point or meristem, such as an imidazolinone or a sulfonylurea. Exemplary genes in this category code for mutant ALS and AHAS enzyme as described, for example, by Lee, et al., (1988) EMBO J. 7:1241 and Miki, et al., (1990) Theor. Appl. Genet. 80:449, respectively. See also, U.S. Pat. Nos. 5,605,011; 5,013,659; 5,141,870; 5,767,361; 5,731,180; 5,304,732; 4,761,373; 5,331,107; 5,928,937 and 5,378,824; U.S. patent application Ser. No. 11/683,737 and International Publication WO 1996/33270.

[0175] (B) A polynucleotide encoding a protein for resistance to Glyphosate (resistance imparted by mutant 5-enolpyruvl-3-phosphikimate synthase (EPSP) and aroA genes, respectively) and other phosphono compounds such as glufosinate (phosphinothricin acetyl transferase (PAT) and Streptomyces hygroscopicus phosphinothricin acetyl transferase (bar) genes), and pyridinoxy or phenoxy proprionic acids and cyclohexones (ACCase inhibitor-encoding genes). See, for example, U.S. Pat. No. 4,940,835 to Shah, et al., which discloses the nucleotide sequence of a form of EPSPS which can confer glyphosate resistance. U.S. Pat. No. 5,627,061 to Barry, et al., also describes genes encoding EPSPS enzymes. See also, U.S. Pat. Nos. 6,566,587; 6,338,961; 6,248,876 B1; 6,040,497; 5,804,425; 5,633,435; 5,145,783; 4,971,908; 5,312,910; 5,188,642; 5,094,945, 4,940,835; 5,866,775; 6,225,114 B1; 6,130,366; 5,310,667; 4,535,060; 4,769,061; 5,633,448; 5,510,471; Re. 36,449; RE 37,287 E and 5,491,288 and International Publications EP 1173580; WO 2001/66704; EP 1173581 and EP 1173582.

[0176] Glyphosate resistance is also imparted to plants that express a gene encoding a glyphosate oxido-reductase enzyme as described more fully in U.S. Pat. Nos. 5,776,760 and 5,463,175. In addition glyphosate resistance can be imparted to plants by the over expression of genes encoding glyphosate N-acetyltransferase. See, for example, U.S. Pat. Nos. 7,462,481; 7,405,074 and US Patent Application Publication Number US 2008/0234130. A DNA molecule encoding a mutant aroA gene can be obtained under ATCC Accession Number 39256, and the nucleotide sequence of the mutant gene is disclosed in U.S. Pat. No. 4,769,061 to Comai. EP Application Number 0 333 033 to Kumada, et al., and U.S. Pat. No. 4,975,374 to Goodman, et al., disclose nucleotide sequences of glutamine synthetase genes which confer resistance to herbicides such as L-phosphinothricin. The nucleotide sequence of a phosphinothricin-acetyl-transferase gene is provided in EP Application Numbers 0 242 246 and 0 242 236 to Leemans, et al.; De Greef, et al., (1989) Bio/Technology 7:61, describe the production of transgenic plants that express chimeric bar genes coding for phosphinothricin acetyl transferase activity. See also, U.S. Pat. Nos. 5,969,213; 5,489,520; 5,550,318; 5,874,265; 5,919,675; 5,561,236; 5,648,477; 5,646,024; 6,177,616 B1 and 5,879,903. Exemplary genes conferring resistance to phenoxy proprionic acids and cyclohexones, such as sethoxydim and haloxyfop, are the Acct-S1, Acc1-S2 and Acc1-S3 genes described by Marshall, et al., (1992) Theor. Appl. Genet. 83:435.

[0177] (C) A polynucleotide encoding a protein for resistance to herbicide that inhibits photosynthesis, such as a triazine (psbA and gs+ genes) and a benzonitrile (nitrilase gene). Przibilla, et al., (1991) Plant Cell 3:169, describe the transformation of Chlamydomonas with plasmids encoding mutant psbA genes. Nucleotide sequences for nitrilase genes are disclosed in U.S. Pat. No. 4,810,648 to Stalker and DNA molecules containing these genes are available under ATCC Accession Numbers 53435, 67441 and 67442. Cloning and expression of DNA coding for a glutathione S-transferase is described by Hayes, et al., (1992) Biochem. J. 285:173.

[0178] (D) A polynucleotide encoding a protein for resistance to Acetohydroxy acid synthase, which has been found to make plants that express this enzyme resistant to multiple types of herbicides, has been introduced into a variety of plants (see, e.g., Hattori, et al., (1995) Mol Gen Genet. 246:419). Other genes that confer resistance to herbicides include: a gene encoding a chimeric protein of rat cytochrome P4507A1 and yeast NADPH-cytochrome P450 oxidoreductase (Shiota, et al., (1994) Plant Physiol 106:17), genes for glutathione reductase and superoxide dismutase (Aono, et al., (1995) Plant Cell Physiol 36:1687) and genes for various phosphotransferases (Datta, et al., (1992) Plant Mol Biol 20:619).

[0179] (E) A polynucleotide encoding resistance to a herbicide targeting Protoporphyrinogen oxidase (protox) which is necessary for the production of chlorophyll. The protox enzyme serves as the target for a variety of herbicidal compounds. These herbicides also inhibit growth of all the different species of plants present, causing their total destruction. The development of plants containing altered protox activity which are resistant to these herbicides are described in U.S. Pat. Nos. 6,288,306 B1; 6,282,837 B1 and 5,767,373 and International Publication WO 2001/12825.

[0180] (F) The aad-1 gene (originally from Sphingobium herbicidovorans) encodes the aryloxyalkanoate dioxygenase (AAD-1) protein. The trait confers tolerance to 2,4-dichlorophenoxyacetic acid and aryloxyphenoxypropionate (commonly referred to as “fop” herbicides such as quizalofop) herbicides. The aad-1 gene, itself, for herbicide tolerance in plants was first disclosed in WO 2005/107437 (see also, US 2009/0093366). The aad-12 gene, derived from Delftia acidovorans, which encodes the aryloxyalkanoate dioxygenase (AAD-12) protein that confers tolerance to 2,4-dichlorophenoxyacetic acid and pyridyloxyacetate herbicides by deactivating several herbicides with an aryloxyalkanoate moiety, including phenoxy auxin (e.g., 2,4-D, MCPA), as well as pyridyloxy auxins (e.g., fluoroxypyr, triclopyr).

[0181] (G) A polynucleotide encoding a herbicide resistant dicamba monooxygenase disclosed in US Patent Application Publication 2003/0135879 for imparting dicamba tolerance.

[0182] (H) A polynucleotide molecule encoding bromoxynil nitrilase (Bxn) disclosed in U.S. Pat. No. 4,810,648 for imparting bromoxynil tolerance.

[0183] (I) A polynucleotide molecule encoding phytoene (crtl) described in Misawa, et al., (1993) Plant J. 4:833-840 and in Misawa, et al., (1994) Plant J. 6:481-489 for norflurazon tolerance.

[0184] iii. Transgenes that Confer or Contribute to an Altered Grain Characteristic

[0185] (A) Altered fatty acids, for example, by (1) Down-regulation of stearoyl-ACP to increase stearic acid content of the plant. See, Knultzon, et al., (1992) Proc. Natl. Acad. Sci. USA 89:2624 and WO 1999/64579 (Genes to Alter Lipid Profiles in Corn); (2) Elevating oleic acid via FAD-2 gene modification and/or decreasing linolenic acid via FAD-3 gene modification (see, U.S. Pat. Nos. 6,063,947; 6,323,392; 6,372,965 and WO 1993/11245); (3) Altering conjugated linolenic or linoleic acid content, such as in WO 2001/12800; (4) Altering LEC1, AGP, Dek1, Superal1, mil ps, various Ipa genes such as Ipa1, Ipa3, hpt or hggt. For example, see, WO 2002/42424, WO 1998/22604, WO 2003/011015, WO 2002/057439, WO 2003/011015, U.S. Pat. Nos. 6,423,886, 6,197,561, 6,825,397 and US Patent Application Publication Numbers US 2003/0079247, US 2003/0204870 and Rivera-Madrid, et al., (1995) Proc. Natl. Acad. Sci. 92:5620-5624; (5) Genes encoding delta-8 desaturase for making long-chain polyunsaturated fatty acids (U.S. Pat. Nos. 8,058,571 and 8,338,152), delta-9 desaturase for lowering saturated fats (U.S. Pat. No. 8,063,269), Primula delta 6-desaturase for improving omega-3 fatty acid profiles; (6) Isolated nucleic acids and proteins associated with lipid and sugar metabolism regulation, in particular, lipid metabolism protein (LMP) used in methods of producing transgenic plants and modulating levels of seed storage compounds including lipids, fatty acids, starches or seed storage proteins and use in methods of modulating the seed size, seed number, seed weights, root length and leaf size of plants (EP 2404499); (7) Altering expression of a High-Level Expression of Sugar-Inducible 2 (HSI2) protein in the plant to increase or decrease expression of HSI2 in the plant. Increasing expression of HSI2 increases oil content while decreasing expression of HSI2 decreases abscisic acid sensitivity and/or increases drought resistance (US Patent Application Publication Number 2012/0066794); (8) Expression of cytochrome b5 (Cb5) alone or with FAD2 to modulate oil content in plant seed, particularly to increase the levels of omega-3 fatty acids and improve the ratio of omega-6 to omega-3 fatty acids (US Patent Application Publication Number 2011/0191904); and (9) Nucleic acid molecules encoding wrinkled1-like polypeptides for modulating sugar metabolism (U.S. Pat. No. 8,217,223).

[0186] (B) Altered phosphorus content, for example, by the (1) introduction of a phytase-encoding gene would enhance breakdown of phytate, adding more free phosphate to the transformed plant. For example, see, Van Hartingsveldt, et al., (1993) Gene 127:87, for a disclosure of the nucleotide sequence of an Aspergillus niger phytase gene; and (2) modulating a gene that reduces phytate content. In maize, this, for example, could be accomplished, by cloning and then re-introducing DNA associated with one or more of the alleles, such as the LPA alleles, identified in maize mutants characterized by low levels of phytic acid, such as in WO 2005/113778 and/or by altering inositol kinase activity as in WO 2002/059324, US Patent Application Publication Number 2003/0009011, WO 2003/027243, US Patent Application Publication Number 2003/0079247, WO 1999/05298, U.S. Pat. Nos. 6,197,561, 6,291,224, 6,391,348, WO 2002/059324, US Patent Application Publication Number 2003/0079247, WO 1998/45448, WO 1999/55882, WO 2001/04147.

[0187] (C) Altered carbohydrates affected, for example, by altering a gene for an enzyme that affects the branching pattern of starch or, a gene altering thioredoxin such as NTR and/or TRX (see, U.S. Pat. No. 6,531,648. which is incorporated by reference for this purpose) and/or a gamma zein knock out or mutant such as cs27 or TUSC27 or en27 (see, U.S. Pat. No. 6,858,778 and US Patent Application Publication Number 2005/0160488, US Patent Application Publication Number 2005/0204418, which are incorporated by reference for this purpose). See, Shiroza, et al., (1988) J. Bacteriol. 170:810 (nucleotide sequence of Streptococcus mutant fructosyltransferase gene), Steinmetz, et al., (1985) Mol. Gen. Genet. 200:220 (nucleotide sequence of Bacillus subtilis levansucrase gene), Pen, et al., (1992) Bio/Technology 10:292 (production of transgenic plants that express Bacillus licheniformis alpha-amylase), Elliot, et al., (1993) Plant Molec. Biol. 21:515 (nucleotide sequences of tomato invertase genes), Sogaard, et al., (1993) J. Biol. Chem. 268:22480 (site-directed mutagenesis of barley alpha-amylase gene) and Fisher, et al., (1993) Plant Physiol. 102:1045 (maize endosperm starch branching enzyme II), WO 1999/10498 (improved digestibility and/or starch extraction through modification of UDP-D-xylose 4-epimerase, Fragile 1 and 2, Refl, HCHL, C4H), U.S. Pat. No. 6,232,529 (method of producing high oil seed by modification of starch levels (AGP)). The fatty acid modification genes mentioned herein may also be used to affect starch content and/or composition through the interrelationship of the starch and oil pathways.

[0188] (D) Altered antioxidant content or composition, such as alteration of tocopherol or tocotrienols. For example, see, U.S. Pat. No. 6,787,683, US Patent Application Publication Number 2004/0034886 and WO 2000/68393 involving the manipulation of antioxidant levels and WO 2003/082899 through alteration of a homogentisate geranyl geranyl transferase (hggt).

[0189] (E) Altered essential seed amino acids. For example, see, U.S. Pat. No. 6,127,600 (method of increasing accumulation of essential amino acids in seeds), U.S. Pat. No. 6,080,913 (binary methods of increasing accumulation of essential amino acids in seeds), U.S. Pat. No. 5,990,389 (high lysine), WO 1999/40209 (alteration of amino acid compositions in seeds), WO 1999/29882 (methods for altering amino acid content of proteins), U.S. Pat. No. 5,850,016 (alteration of amino acid compositions in seeds), WO 1998/20133 (proteins with enhanced levels of essential amino acids), U.S. Pat. No. 5,885,802 (high methionine), U.S. Pat. No. 5,885,801 (high threonine), U.S. Pat. No. 6,664,445 (plant amino acid biosynthetic enzymes), U.S. Pat. No. 6,459,019 (increased lysine and threonine), U.S. Pat. No. 6,441,274 (plant tryptophan synthase beta subunit), U.S. Pat. No. 6,346,403 (methionine metabolic enzymes), U.S. Pat. No. 5,939,599 (high sulfur), U.S. Pat. No. 5,912,414 (increased methionine), WO 1998/56935 (plant amino acid biosynthetic enzymes), WO 1998/45458 (engineered seed protein having higher percentage of essential amino acids), WO 1998/42831 (increased lysine), U.S. Pat. No. 5,633,436 (increasing sulfur amino acid content), U.S. Pat. No. 5,559,223 (synthetic storage proteins with defined structure containing programmable levels of essential amino acids for improvement of the nutritional value of plants), WO 1996/01905 (increased threonine), WO 1995/15392 (increased lysine), US Patent Application Publication Number 2003/0163838, US Patent Application Publication Number 2003/0150014, US Patent Application Publication Number 2004/0068767, U.S. Pat. No. 6,803,498, WO 2001/79516.

[0190] iv. Genes that Control Male-Sterility

[0191] There are several methods of conferring genetic male sterility available, such as multiple mutant genes at separate locations within the genome that confer male sterility, as disclosed in U.S. Pat. Nos. 4,654,465 and 4,727,219 to Brar, et al., and chromosomal translocations as described by Patterson in U.S. Pat. Nos. 3,861,709 and 3,710,511. In addition to these methods, Albertsen, et al., U.S. Pat. No. 5,432,068, describe a system of nuclear male sterility which includes: identifying a gene which is critical to male fertility; silencing this native gene which is critical to male fertility; removing the native promoter from the essential male fertility gene and replacing it with an inducible promoter; inserting this genetically engineered gene back into the plant; and thus creating a plant that is male sterile because the inducible promoter is not “on” resulting in the male fertility gene not being transcribed. Fertility is restored by inducing or turning “on”, the promoter, which in turn allows the gene that confers male fertility to be transcribed. Non-limiting examples include: (A) Introduction of a deacetylase gene under the control of a tapetum-specific promoter and with the application of the chemical N—Ac—PPT (WO 2001/29237); (B) Introduction of various stamen-specific promoters (WO 1992/13956, WO 1992/13957); and (C) Introduction of the barnase and the barstar gene (Paul, et al., (1992) Plant Mol. Biol. 19:611-622). For additional examples of nuclear male and female sterility systems and genes, see also, U.S. Pat. Nos. 5,859,341; 6,297,426; 5,478,369; 5,824,524; 5,850,014 and 6,265,640.

[0192] v. Genes that Create a Site for Site Specific DNA Integration.

[0193] This includes the introduction of FRT sites that may be used in the FLP/FRT system and/or Lox sites that may be used in the Cre/Loxp system. For example, see, Lyznik, et al., (2003) Plant Cell Rep 21:925-932 and WO 1999/25821. Other systems that may be used include the Gln recombinase of phage Mu (Maeser, et al., (1991) Vicki Chandler, The Maize Handbook ch. 118 (Springer-Verlag 1994), the Pin recombinase of E. coli (Enomoto, et al., 1983) and the R/RS system of the pSRi plasmid (Araki, et al., 1992).

[0194] vi. Genes that Affect Abiotic Stress Resistance

[0195] Including but not limited to flowering, ear and seed development, enhancement of nitrogen utilization efficiency, altered nitrogen responsiveness, drought resistance or tolerance, cold resistance or tolerance and salt resistance or tolerance and increased yield under stress. Non-limiting examples include: (A) For example, see: WO 2000/73475 where water use efficiency is altered through alteration of malate; U.S. Pat. Nos. 5,892,009, 5,965,705, 5,929,305, 5,891,859, 6,417,428, 6,664,446, 6,706,866, 6,717,034, 6,801,104, WO 2000/060089, WO 2001/026459, WO 2001/035725, WO 2001/034726, WO 2001/035727, WO 2001/036444, WO 2001/036597, WO 2001/036598, WO 2002/015675, WO 2002/017430, WO 2002/077185, WO 2002/079403, WO 2003/013227, WO 2003/013228, WO 2003/014327, WO 2004/031349, WO 2004/076638, WO 199809521; (B) WO 199938977 describing genes, including CBF genes and transcription factors effective in mitigating the negative effects of freezing, high salinity and drought on plants, as well as conferring other positive effects on plant phenotype; (C) US Patent Application Publication Number 2004/0148654 and WO 2001/36596 where abscisic acid is altered in plants resulting in improved plant phenotype such as increased yield and/or increased tolerance to abiotic stress; (D) WO 2000/006341, WO 2004/090143, U.S. Pat. Nos. 7,531,723 and 6,992,237 where cytokinin expression is modified resulting in plants with increased stress tolerance, such as drought tolerance, and/or increased yield. Also see, WO 2002/02776, WO 2003/052063, JP 2002/281975, U.S. Pat. No. 6,084,153, WO 2001/64898, U.S. Pat. Nos. 6,177,275 and 6,107,547 (enhancement of nitrogen utilization and altered nitrogen responsiveness); (E) For ethylene alteration, see, US Patent Application Publication Number 2004/0128719, US Patent Application Publication Number 2003/0166197 and WO 2000/32761; (F) For plant transcription factors or transcriptional regulators of abiotic stress, see, e.g., US Patent Application Publication Number 2004/0098764 or US Patent Application Publication Number 2004/0078852; (G) Genes that increase expression of vacuolar pyrophosphatase such as AVP1 (U.S. Pat. No. 8,058,515) for increased yield; nucleic acid encoding a HSFA4 or a HSFA5 (Heat Shock Factor of the class A4 or A5) polypeptides, an oligopeptide transporter protein (OPT4-like) polypeptide; a plastochron2-like (PLA2-like) polypeptide or a Wuschel related homeobox 1-like (WOX1-like) polypeptide (U. Patent Application Publication Number US 2011/0283420); (H) Down regulation of polynucleotides encoding poly (ADP-ribose) polymerase (PARP) proteins to modulate programmed cell death (U.S. Pat. No. 8,058,510) for increased vigor; (I) Polynucleotide encoding DTP21 polypeptides for conferring drought resistance (US Patent Application Publication Number US 2011/0277181); (J) Nucleotide sequences encoding ACC Synthase 3 (ACS3) proteins for modulating development, modulating response to stress, and modulating stress tolerance (US Patent Application Publication Number US 2010/0287669); (K) Polynucleotides that encode proteins that confer a drought tolerance phenotype (DTP) for conferring drought resistance (WO 2012/058528); (L) Tocopherol cyclase (TC) genes for conferring drought and salt tolerance (US Patent Application Publication Number 2012/0272352); (M) CAAX amino terminal family proteins for stress tolerance (U.S. Pat. No. 8,338,661); (N) Mutations in the SAL1 encoding gene have increased stress tolerance, including increased drought resistant (US Patent Application Publication Number 2010/0257633); (O) Expression of a nucleic acid sequence encoding a polypeptide selected from the group consisting of: GRF polypeptide, RAA1-like polypeptide, SYR polypeptide, ARKL polypeptide, and YTP polypeptide increasing yield-related traits (US Patent Application Publication Number 2011/0061133); and (P) Modulating expression in a plant of a nucleic acid encoding a Class III Trehalose Phosphate Phosphatase (TPP) polypeptide for enhancing yield-related traits in plants, particularly increasing seed yield (US Patent Application Publication Number 2010/0024067).

[0196] Other genes and transcription factors that affect plant growth and agronomic traits such as yield, flowering, plant growth and/or plant structure, can be introduced or introgressed into plants, see e.g., WO 1997/49811 (LHY), WO 1998/56918 (ESD4), WO 1997/10339 and U.S. Pat. No. 6,573,430 (TFL), U.S. Pat. No. 6,713,663 (FT), WO 1996/14414 (CON), WO 1996/38560, WO 2001/21822 (VRN1), WO 2000/44918 (VRN2), WO 1999/49064 (GI), WO 2000/46358 (FR1), WO 1997/29123, U.S. Pat. Nos. 6,794,560, 6,307,126 (GAI), WO 1999/09174 (D8 and Rht) and WO 2004/076638 and WO 2004/031349 (transcription factors).

[0197] vii. Genes that Confer Increased Yield

[0198] Non-limiting examples of genes that confer increased yield are: (A) A transgenic crop plant transformed by a 1-AminoCyclopropane-1-Carboxylate Deaminase-like Polypeptide (ACCDP) coding nucleic acid, wherein expression of the nucleic acid sequence in the crop plant results in the plant's increased root growth, and/or increased yield, and/or increased tolerance to environmental stress as compared to a wild type variety of the plant (U.S. Pat. No. 8,097,769); (B) Over-expression of maize zinc finger protein gene (Zm-ZFP1) using a seed preferred promoter has been shown to enhance plant growth, increase kernel number and total kernel weight per plant (US Patent Application Publication Number 2012/0079623); (C) Constitutive over-expression of maize lateral organ boundaries (LOB) domain protein (Zm-LOBDP1) has been shown to increase kernel number and total kernel weight per plant (US Patent Application Publication Number 2012/0079622); (D) Enhancing yield-related traits in plants by modulating expression in a plant of a nucleic acid encoding a VIM1 (Variant in Methylation 1)-like polypeptide or a VTC2-like (GDP-L-galactose phosphorylase) polypeptide or a DUF1685 polypeptide or an ARF6-like (Auxin Responsive Factor) polypeptide (WO 2012/038893); (E) Modulating expression in a plant of a nucleic acid encoding a Ste20-like polypeptide or a homologue thereof gives plants having increased yield relative to control plants (EP 2431472); and (F) Genes encoding nucleoside diphosphatase kinase (NDK) polypeptides and homologs thereof for modifying the plant's root architecture (US Patent Application Publication Number 2009/0064373).

### IX. Methods of Use

[0199] Methods disclosed herein comprise methods for controlling a plant insect pest, such as a Coleopteran, Hemiptera, or Lepidopteran plant pest, including a Diabrotica, Leptinotarsa, Phyllotreta, Acyrthosiphan, Bemisia, Halyomorpha, Nezara, or Spodoptera plant pest. In one embodiment, the method comprises feeding or applying to a plant insect pest a composition comprising a silencing element disclosed herein, wherein said silencing element, when ingested or contacted by a plant insect pest (i.e., but not limited to, a Coleopteran plant pest including a Diabrotica plant pest, such as, D. virgifera virgifera, D. barberi, D. virgifera zeae, D. speciosa, or D. undecimpunctata), reduces the level of a target polynucleotide of the pest and thereby controls the pest. The pest can be fed the silencing element in a variety of ways. The silencing element may be fed to male, female, or both sexes of a pest. For example, in an embodiment, a polynucleotide encoding a silencing element, i.e., a silencing element targeting one or more polynucleotides as set forth in SEQ ID NOS.: 1-398, is introduced into a plant. As the plant pest feeds on the plant or part thereof expressing these sequences, the silencing element is delivered to the pest at larval, adult, or at any or all developmental stages. In one embodiment, the methods and compositions described herein further comprise a transgenic plant comprising a silencing element disclosed herein, wherein the silencing element has insecticidal activity at larval, adult or at any or all developmental stages. When the silencing element is delivered to the plant in this manner, it is recognized that the silencing element can be expressed constitutively or alternatively, it may be produced in a stage-specific manner by employing the various inducible or tissue-preferred or developmentally regulated promoters that are discussed elsewhere herein. In certain embodiments, the silencing element is expressed in the roots, stalk or stem, leaf including pedicel, xylem and phloem, fruit or reproductive tissue, silk, flowers and all parts therein or any combination thereof.

[0200] In another method, a composition comprising at least one silencing element disclosed herein is applied to a plant. In such embodiments, the silencing element may be formulated in an agronomically suitable and/or environmentally acceptable carrier, which is preferably, suitable for dispersal in fields. In some embodiments, silencing elements targeting different insect stages, pathways, and sexes may be combined for sterility and insecticidal activities. In one embodiment, the silencing elements disclosed herein may be mixed with pesticidal chemicals by tank mix. In addition, the carrier may also include compounds that increase the half-life of the composition. In certain embodiments, the composition comprising the silencing element is formulated in such a manner that it persists in the environment for a length of time sufficient to allow it to be delivered to a plant insect pest. In such embodiments, the composition can be applied to an area inhabited by a plant insect pest. In one embodiment, the composition is applied externally to a plant (i.e., by spraying a field) to protect the plant from pests.

[0201] In certain embodiments, the disclosed polynucleotides or constructs can be stacked with any combination of polynucleotide sequences of interest in order to create plants with a desired trait. A trait, as used herein, refers to the phenotype derived from a particular sequence or groups of sequences. For example, the polynucleotides described herein may be stacked with any other polynucleotides encoding polypeptides having pesticidal and/or insecticidal activity, such as other Bacillus thuringiensis toxic proteins (described in U.S. Pat. Nos. 5,366,892; 5,747,450; 5,737,514; 5,723,756; 5,593,881; and Geiser et al. (1986) Gene 48:109), lectins (Van Damme et al. (1994) Plant Mol. Biol. 24:825, pentin (described in U.S. Pat. No. 5,981,722), and the like. The combinations generated may also include multiple copies of any one of the polynucleotides of interest. The polynucleotides described herein can also be stacked with any other gene or combination of genes to produce plants with a variety of desired trait combinations including, but not limited to, traits desirable for animal feed such as high oil genes (e.g., U.S. Pat. No. 6,232,529); balanced amino acids (e.g., hordothionins (U.S. Pat. Nos. 5,990,389; 5,885,801; 5,885,802; and 5,703,409); barley high lysine (Williamson et al. (1987) Eur. J. Biochem. 165:99-106; and WO 98/20122) and high methionine proteins (Pedersen et al. (1986) J. Biol. Chem. 261:6279; Kirihara et al. (1988) Gene 71:359; and Musumura et al. (1989) Plant Mol. Biol. 12:123)); increased digestibility (e.g., modified storage proteins (U.S. application Ser. No. 10/053,410, filed Nov. 7, 2001); and thioredoxins (U.S. application Ser. No. 10/005,429, filed Dec. 3, 2001)).

[0202] Disclosed polynucleotides can also be stacked with traits desirable for disease or herbicide resistance (e.g., fumonisin detoxification genes (U.S. Pat. No. 5,792,931); avirulence and disease resistance genes (Jones et al. (1994) Science 266:789; Martin et al. (1993) Science 262:1432; Mindrinos et al. (1994) Cell 78:1089); acetolactate synthase (ALS) mutants that lead to herbicide resistance such as the S4 and/or Hra mutations; inhibitors of glutamine synthase such as phosphinothricin or basta (e.g., bar gene); and glyphosate resistance (EPSPS gene)); and traits desirable for processing or process products such as high oil (e.g., U.S. Pat. No. 6,232,529); modified oils (e.g., fatty acid desaturase genes (U.S. Pat. No. 5,952,544; WO 94/11516)); modified starches (e.g., ADPG pyrophosphorylases (AGPase), starch synthases (SS), starch branching enzymes (SBE), and starch debranching enzymes (SDBE)); and polymers or bioplastics (e.g., U.S. Pat. No. 5,602,321; beta-ketothiolase, polyhydroxybutyrate synthase, and acetoacetyl-CoA reductase (Schubert et al. (1988) J. Bacteriol. 170:5837-5847) facilitate expression of polyhydroxyalkanoates (PHAs)); the disclosures of which are herein incorporated by reference. One could also combine the polynucleotides with polynucleotides providing agronomic traits such as male sterility (e.g., see U.S. Pat. No. 5,583,210), stalk strength, drought resistance (e.g., U.S. Pat. No. 7,786,353), flowering time, or transformation technology traits such as cell cycle regulation or gene targeting (e.g., WO 99/61619, WO 00/17364, and WO 99/25821).

[0203] These stacked combinations can be created by any method including, but not limited to, cross-breeding plants by any conventional or TopCross methodology, or genetic transformation. If the sequences are stacked by genetically transforming the plants (i.e., molecular stacks), the polynucleotide sequences of interest can be combined at any time and in any order. For example, a transgenic plant comprising one or more desired traits can be used as the target to introduce further traits by subsequent transformation. The traits can be introduced simultaneously in a co-transformation protocol with the polynucleotides of interest provided by any combination of transformation cassettes. For example, if two sequences will be introduced, the two sequences can be contained in separate transformation cassettes (trans) or contained on the same transformation cassette (cis). Expression of the sequences can be driven by the same promoter or by different promoters. In certain cases, it may be desirable to introduce a transformation cassette that will suppress the expression of the polynucleotide of interest. This may be combined with any combination of other suppression cassettes or overexpression cassettes to generate the desired combination of traits in the plant. It is further recognized that polynucleotide sequences can be stacked at a desired genomic location using a site-specific recombination system. See, for example, WO99/25821, WO99/25854, WO99/25840, WO99/25855, and WO99/25853.

### X. Insect Resistance Management Methods

[0204] Methods disclosed herein comprise methods for controlling a plant insect pest, such as a Coleopteran, Hemiptera, or Lepidopteran plant pest, including a Diabrotica, Leptinotarsa, Phyllotreta, Acyrthosiphan, Bemisia, Halyomorpha, Nezara, or Spodoptera plant pest, such as insect resistance management. Insect resistance management (IRM) is the term used to describe practices aimed at reducing the potential for insect pests to become resistant to a pesticide. Maintenance of Bt (or other pesticidal protein, chemical, or biological) IRM is of great importance because of the threat insect resistance poses to the future use of Bt plant-incorporated protectants and Bt technology as a whole. Specific IRM strategies, such as the high dose/structured refuge strategy, delay insect resistance to specific Bt proteins produced in corn, cotton, and potatoes. However, such strategies result in portions of crops being left susceptible to one or more pests in order to ensure that non-resistant insects develop and become available to mate with any resistant pests produced in protected crops. Accordingly, from a farmer/producer's perspective, it is highly desirable to have as small a refuge as possible and yet still manage insect resistance, in order that the greatest yield be obtained while still maintaining the efficacy of the pest control method used, whether Bt, chemical, some other method, or combinations thereof.

[0205] An often used IRM strategy is the planting of a refuge (a portion of the total acreage using non-Bt/pesticidal trait seed), as it is commonly-believed that this will delay the development of insect resistance to pesticidal traits by maintaining insect susceptibility. The theoretical basis of the refuge strategy for delaying resistance hinges on the assumption that the frequency and recessiveness of insect resistance is inversely proportional to pest susceptibility; resistance will be rare and recessive only when pests are very susceptible to the toxin, and conversely resistance will be more frequent and less recessive when pests are not very susceptible. Furthermore, the strategy assumes that resistance to Bt is recessive and is conferred by a single locus with two alleles resulting in three genotypes: susceptible homozygotes (SS), heterozygotes (RS), and resistant homozygotes (RR). It also assumes that there will be a low initial resistance allele frequency and that there will be extensive random mating between resistant and susceptible adults. Under ideal circumstances, only rare RR individuals will survive a pesticidal toxin produced by the crop. Both SS and RS individuals will be susceptible to the pesticidal toxin. A structured refuge is a non-Bt/pesticidal trait portion of a grower's field or set of fields that provides for the production of susceptible (SS) insects that may randomly mate with rare resistant (RR) insects surviving the pesticidal trait crop, which may be a Bt trait crop, to produce susceptible RS heterozygotes that will be killed by the Bt/pesticidal trait crop. An integrated refuge is a certain portion of randomly planted non-Bt/pesticidal trait portion of a grower's field or set of fields that provides for the production of susceptible (SS) insects that may randomly mate with rare resistant (RR) insects surviving the pesticidal trait crop to produce susceptible RS heterozygotes that will be killed by the pesticidal trait crop Each refuge strategy will remove resistant (R) alleles from the insect populations and delay the evolution of resistance.

[0206] Another strategy to reduce the need for refuge is the pyramiding of traits with different modes of action against a target insect pest. For example, Bt toxins that have different modes of action stacked in one transgenic plant are able to have reduced refuge requirements. Different modes of action in a stacked combination also maintains the durability of each trait, as resistance is slower to develop to each trait.

[0207] Currently, the size, placement, and management of the refuge are often considered critical to the success of refuge strategies to mitigate insect resistance to the Bt/pesticidal trait produced in corn, cotton, soybean, and other crops. Because of the decrease in yield in refuge planting areas, some farmers choose to eschew the refuge requirements, and others do not follow the size and/or placement requirements. These issues result in either no refuge or less effective refuge, and a corresponding risk of the increase in the development of resistance pests.

[0208] Accordingly, there remains a need for methods for managing pest resistance in a plot of pest resistant crop plants. It would be useful to provide an improved method for the protection of plants, especially corn or other crop plants, from feeding damage by pests. It would be particularly useful if such a method would reduce the required application rate of conventional chemical pesticides, and also if it would limit the number of separate field operations that were required for crop planting and cultivation. In addition, it would be useful to have a method of deploying a transgenic refuge that eliminates the above-described problems with regard to compliance that dilute or remove the efficacy of many resistance management strategies.

[0209] One embodiment relates to a method of reducing the development of resistant pests comprising providing a plant protection composition to a plant (Bt toxin, transgenic insecticidal protein, other insecticidal proteins, chemical insecticides, insecticidal biological entomopathogens, etc.) and contacting the plant pest with a silencing element, i.e., of a silencing element targeting one or more polynucleotides as set forth in SEQ ID NOS.: 1-398, wherein the silencing element, i.e., of a silencing element targeting one or more polynucleotides as set forth in SEQ ID NOS.: 1-398, produces a decrease in expression of one or more of the sequences in the target pest and controls the pest.

[0210] A further embodiment relates to a method of increasing the durability of plant pest compositions comprising providing a plant protection composition to a plant (Bt toxin, transgenic insecticidal protein, other insecticidal proteins, chemical insecticides, insecticidal biological entomopathogens etc.) and contacting a plant pest with the silencing element, i.e., of one or more polynucleotides as set forth in SEQ ID NOS.: 1-398, or complements thereof, an expression construct comprising a sequence as set forth in SEQ ID NOS.: 1-398, or complements thereof, or silencing elements targeting said polynucleotides, produces a decrease in expression of one or more of the sequences in the target pest and controls the pest. In another embodiment, the refuge planted as a strip, a block, or integrated with the trait seed comprises a plant further comprising a silencing element (for example, a silencing element targeting one or more polynucleotides as set forth in SEQ ID NOS.: 1-398).

[0211] In a still further embodiment, the refuge required may be reduced or eliminated by the presence of a silencing element applied to the non-refuge plants as a different mode of action than any insecticidal trait in the non-refuge plants. In another embodiment, the refuge or non-refuge may include a silencing element, i.e., of one or more polynucleotides as set forth in SEQ ID NOS.: 1-398, or complements thereof, an expression construct comprising a sequence as set forth in SEQ ID NOS.: 1-398, or complements thereof, or silencing elements targeting said polynucleotides, as a spray, bait, lure, or as a different transgenic plant.

[0212] In a further embodiment, a pest insect is fed a diet comprising one or more polynucleotides as set forth in SEQ ID NOS.: 1-398, or complements thereof, an expression construct comprising a sequence as set forth in SEQ ID NOS.: 1-398, or complements thereof, or silencing elements targeting said polynucleotides, and said insects are released onto plants at 1, 2, 3, 4, 5, 6, 7, 8, 9, or 10 days following feeding. In a yet further embodiment, the pest is a pest insect, and the pest insect is fed during a larval or adult stage.

[0213] Current IRM strategy requires a high dose of Bt toxins to minimize insect resistance development. Due to phyto-toxicity, it can be difficult to achieve the required high dose. Integrated pest management (IPM) by different means of insect control may be used to delay insect resistance exposed to a sub-optimal dose of protein toxin, such as a Bt toxin. RNAi and silencing elements may be deployed as part of an IPM strategy.

[0214] As used herein, the term “pesticidal” is used to refer to a toxic effect against a pest (e.g., Coleopteran plant pests), and includes activity of either, or both, an externally supplied pesticide and/or an agent that is produced by the crop plants. As used herein, the term “different mode of pesticidal action” includes the pesticidal effects of one or more resistance traits, whether introduced into the crop plants by transformation or traditional breeding methods, such as binding of a pesticidal toxin produced by the crop plants to different binding sites (i.e., different toxin receptors and/or different sites on the same toxin receptor) in the gut membranes of corn rootworms or through RNA interference.

[0215] In certain embodiments, the polynucleotide sequences disclosed herein may be used as markers to monitor insect resistance to RNAi and dsRNA traits or insecticidal compositions. A mutation or difference in the genetic DNA or transcript mRNA sequence or abundance may signal insect resistance to RNAi and dsRNA traits or insecticidal compositions. In one embodiment, a kit to monitor resistance is provided, comprising a polynucleotide sequences of SEQ ID NOS: 1-398 or fragments, variants and complements thereof. In a further embodiment, another insectidal mode of action may be deployed in the area or field where insect resistance is found using the polynucleotide sequences disclosed herein.

### XI. Application Methods

[0216] In one embodiment, one or more polynucleotides as set forth in SEQ ID NOS.: 1-398, or complements thereof, an expression construct comprising a sequence as set forth in SEQ ID NOS.: 1-398, or complements thereof, or silencing elements targeting said polynucleotide sequences, and compositions comprising said sequences can be applied directly to the seed. For example, one or more polynucleotides as set forth in SEQ ID NOS.: 1-398, or complements thereof, an expression construct comprising a sequence as set forth in SEQ ID NOS.: 1-398, or complements thereof, or silencing elements targeting said polynucleotide sequences, used in the compositions and methods disclosed herein can be applied without additional components and without having been diluted.

[0217] In one embodiment, sprays, baits, lures, attractants, and seed treatments can comprise one or more polynucleotides as set forth in SEQ ID NOS.: 1-398, or complements thereof, an expression construct comprising a sequence as set forth in SEQ ID NOS.: 1-398, or complements thereof, or silencing elements targeting said polynucleotide sequences, and compositions comprising said sequences.

[0218] In another embodiment, one or more polynucleotides as set forth in SEQ ID NOS.: 1-398, or complements thereof, an expression construct comprising a sequence as set forth in SEQ ID NOS.: 1-398, or complements thereof, or silencing elements targeting said polynucleotide sequences, and compositions comprising said sequences are applied to the seed in the form of a suitable formulation. Suitable formulations and methods for the treatment of seed are known to the person skilled in the art and are described, for example, in the following documents: U.S. Pat. Nos. 4,272,417 A, 4,245,432 A, 4,808,430 A, 5,876,739 A, US 2003/0176428 A1, WO 2002/080675 A1, WO 2002/028186 A2.

[0219] The one or more polynucleotides as set forth in SEQ ID NOS.: 1-398, or complements thereof, an expression construct comprising a sequence as set forth in SEQ ID NOS.: 1-398, or complements thereof, or silencing elements targeting said polynucleotide sequences, and compositions comprising said sequences can be converted into customary seed dressing formulations, such as solutions, emulsions, suspensions, powders, foams, slurries or other coating materials for seed, and also ULV formulations. These formulations are prepared in a known manner by mixing the one or more polynucleotides as set forth in SEQ ID NOS.: 1-398, or complements thereof, an expression construct comprising a sequence as set forth in SEQ ID NOS.: 1-398, or complements thereof, or silencing elements targeting said polynucleotide sequences, and compositions comprising said sequences with customary additives, such as, for example, customary extenders and also solvents or diluents, colorants, wetting agents, dispersants, emulsifiers, defoamers, preservatives, secondary thickeners, adhesives, gibberellins and water as well.

[0220] In another embodiment, suitable colorants that may be present in the seed dressing formulations include all colorants customary for such purposes. Use may be made both of pigments, of sparing solubility in water, and of dyes, which are soluble in water. Examples that may be mentioned include the colorants known under the designations Rhodamine B, C.I. Pigment Red 112, and C.I. Solvent Red 1.

[0221] In another embodiment, suitable wetting agents that may be present in the seed dressing formulations include all substances that promote wetting and are customary in the formulation of active agrochemical substances. With preference it is possible to use alkylnaphthalene-sulphonates, such as diisopropyl- or diisobutylnaphthalene-sulphonates.

[0222] In still another embodiment, suitable dispersants and/or emulsifiers that may be present in the seed dressing formulations include all nonionic, anionic, and cationic dispersants that are customary in the formulation of active agrochemical substances. In one embodiment, nonionic or anionic dispersants or mixtures of nonionic or anionic dispersants can be used. In one embodiment, nonionic dispersants include but are not limited to ethylene oxide-propylene oxide block polymers, alkylphenol polyglycol ethers, and tristyrylphenol polyglycol ethers, and their phosphated or sulphated derivatives.

[0223] In still another embodiment, defoamers that may be present in the seed dressing formulations to be used according to the invention include all foam-inhibiting compounds that are customary in the formulation of agrochemically active compounds including, but not limited, to silicone defoamers, magnesium stearate, silicone emulsions, long-chain alcohols, fatty acids and their salts and also organofluorine compounds and mixtures thereof.

[0224] In still another embodiment, secondary thickeners that may be present in the seed dressing formulations include all compounds which can be used for such purposes in agrochemical compositions, including but not limited to cellulose derivatives, acrylic acid derivatives, polysaccharides, such as xanthan gum or Veegum, modified clays, phyllosilicates, such as attapulgite and bentonite, and also finely divided silicic acids.

[0225] Suitable adhesives that may be present in the seed dressing formulations to be used according to the invention include all customary binders which can be used in seed dressings. Polyvinylpyrrolidone, polyvinyl acetate, polyvinyl alcohol and tylose may be mentioned as being preferred.

[0226] In another embodiment, one or more polynucleotides as set forth in SEQ ID NOS.: 1-398, or complements thereof, or an expression construct comprising a sequence as set forth in SEQ ID NOS.: 1-398, or complements thereof, or silencing elements targeting said polynucleotide sequences, and compositions comprising said sequences is applied to soil in a first application step, applied to seed in a second application, and to applied to the foliar region of a plant in a third application.

[0227] As used herein, applying one or more polynucleotides as set forth in SEQ ID NOS.: 1-398, or a complement thereof, an expression construct comprising a sequence as set forth in SEQ ID NOS.: 1-398, or a complement thereof, or silencing elements targeting said polynucleotide sequences, and compositions comprising said sequences to a seed, a plant, or plant part includes contacting the seed, plant, or plant part directly and/or indirectly with the one or more polynucleotides as set forth in SEQ ID NOS.: 1-398, or complements thereof, an expression construct comprising a sequence as set forth in SEQ ID NOS.: 1-398, or complements thereof, or silencing elements targeting said polynucleotide sequences, and compositions comprising said sequences. In one embodiment, one or more polynucleotides as set forth in SEQ ID NOS.: 1-398, or complements thereof, an expression construct comprising a sequence as set forth in SEQ ID NOS.: 1-398, or complements thereof, or silencing elements targeting said polynucleotide sequences, and compositions comprising said sequences can be directly applied as a spray, a rinse, or a powder, or any combination thereof.

[0228] In another aspect, one or more polynucleotides as set forth in SEQ ID NOS.: 1-398, or complements thereof, an expression construct comprising a sequence as set forth in SEQ ID NOS.: 1-398, or complements thereof, or silencing elements targeting said polynucleotide sequences, and compositions comprising said sequences can be applied directly to a plant or plant part as a powder. As used herein, a powder is a dry or nearly dry bulk solid composed of a large number of very fine particles that may flow freely when shaken or tilted. A dry or nearly dry powder composition disclosed herein preferably contains a low percentage of water, such as, for example, in various aspects, less than 5%, less than 2.5%, or less than 1% by weight.

[0229] In a further embodiment, one or more polynucleotides as set forth in SEQ ID NOS.: 1-398, or complements thereof, an expression construct comprising a sequence as set forth in SEQ ID NOS.: 1-398, or complements thereof, or silencing elements targeting said polynucleotide sequences, may be introduced in a bacteria, a yeast, or fungus by transformation techniques known to the skilled artisan, and said transformed bacteria, yeast, or fungus applied to a plant, soil that the plant is growing in, to a hydroponic medium, seed, or any applied per any of the foregoing application methods as described herein above.

[0230] In one embodiment, the one or more polynucleotides as set forth in SEQ ID NOS.: 1-398, or complements thereof, an expression construct comprising a sequence as set forth in SEQ ID NOS.: 1-398, or complements thereof, or silencing elements targeting said polynucleotide sequences, and compositions comprising said sequences may be formulated by encapsulation technology to improve stability. In one embodiment the encapsulation technology may comprise a bead polymer for timed release over time. In one embodiment, the encapsulated one or more polynucleotides as set forth in SEQ ID NOS.: 1-398, or complements thereof, an expression construct comprising a sequence as set forth in SEQ ID NOS.: 1-398, or complements thereof, or silencing elements targeting said polynucleotide sequences, and compositions comprising said sequences may be applied in a separate application of beads in-furrow to the seeds. In another embodiment, the encapsulated one or more polynucleotides as set forth in SEQ ID NOS.: 1-398, or complements thereof, an expression construct comprising a sequence as set forth in SEQ ID NOS.: 1-398, or complements thereof, or silencing elements targeting said polynucleotide sequences, and compositions comprising said sequences may be co-applied along with seeds simultaneously.

[0231] The coating agent usable for the sustained release microparticles of an encapsulation embodiment may be a substance which is useful for coating the microgranular form with the substance to be supported thereon. Any coating agent which can form a coating difficultly permeable for the supported substance may be used in general, without any particular limitation. For example, higher saturated fatty acid, wax, thermoplastic resin, thermosetting resin and the like may be used.

[0232] Examples of useful higher saturated fatty acid include stearic acid, zinc stearate, stearic acid amide and ethylenebis-stearic acid amide; those of wax include synthetic waxes such as polyethylene wax, carbon wax, Hoechst wax, and fatty acid ester; natural waxes such as carnauba wax, bees wax and Japan wax; and petroleum waxes such as paraffin wax and petrolatum. Examples of thermoplastic resin include polyolefins such as polyethylene, polypropylene, polybutene and polystyrene; vinyl polymers such as polyvinyl acetate, polyvinyl chloride, polyvinylidene chloride, polyacrylic acid, polymethacrylic acid, polyacrylate and polymethacrylate; diene polymers such as butadiene polymer, isoprene polymer, chloroprene polymer, butadiene-styrene copolymer, ethylene-propylene-diene copolymer, styrene-isoprene copolymer, MMA-butadiene copolymer and acrylonitrile-butadiene copolymer; polyolefin copolymers such as ethylene-propylene copolymer, butene-ethylene copolymer, butene-propylene copolymer, ethylene-vinyl acetate copolymer, ethylene-acrylic acid copolymer, styreneacrylic acid copolymer, ethylene-methacrylic acid copolymer, ethylene-methacrylic ester copolymer, ethylene-carbon monoxide copolymer, ethylene-vinyl acetate-carbon monoxide copolymer, ethylene-vinyl acetate-vinyl chloride copolymer and ethylene-vinyl acetate-acrylic copolymer; and vinyl chloride copolymers such as vinyl chloride-vinyl acetate copolymer and vinylidene chloride-vinyl chloride copolymer. Examples of thermosetting resin include polyurethane resin, epoxy resin, alkyd resin, unsaturated polyester resin, phenolic resin, urea-melamine resin, urea resin and silicone resin. Of those, thermoplastic acrylic ester resin, butadienestyrene copolymer resin, thermosetting polyurethane resin and epoxy resin are preferred, and among the preferred resins, particularly thermosetting polyurethane resin is preferred. These coating agents can be used either singly or in combination of two or more kinds.

[0233] In one embodiment, one or more polynucleotides as set forth in SEQ ID NOS.: 1-398, or complements thereof, an expression construct comprising a sequence as set forth in SEQ ID NOS.: 1-398, or complements thereof, or silencing elements targeting said polynucleotide sequences, and compositions comprising said sequences can be formulated to further comprise an entomopathogen. The methods and compositions of the disclosure, in one embodiment relate to a composition comprising one or more one or more polynucleotides as set forth in SEQ ID NOS.: 1-398, or complements thereof, an expression construct comprising a sequence as set forth in SEQ ID NOS.: 1-398, or complements thereof, or silencing elements targeting said polynucleotide sequences, and compositions comprising said sequences and one or more biocontrol agents. As used herein, the term “biocontrol agent” (“BCA”) includes one or more bacteria, fungi or yeasts, protozoas, viruses, entomopathogenic nematodes, and botanical extracts, or products produced by microorganisms including proteins or secondary metabolite, and innoculants that have one or both of the following characteristics: (1) inhibits or reduces plant infestation and/or growth of pathogens, pests, or insects, including but not limited to pathogenic fungi, bacteria, and nematodes, as well as arthropod pests such as insects, arachnids, chilopods, diplopods, or that inhibits plant infestation and/or growth of a combination of plant pathogens, pests, or insects; (2) improves plant performance; (3) improves plant yield; (4) improves plant vigor; and (5) improves plant health.

### XII. Gene Editing Using Cas/CRISPR

[0234] In one embodiment, one or more polynucleotides as set forth in SEQ ID NOS.: 1-398, or complements thereof, an expression construct comprising a sequence as set forth in SEQ ID NOS.: 1-398, or complements thereof, or silencing elements targeting said polynucleotides, and compositions comprising said sequences, can be can be introduced into the genome of a plant using genome editing technologies, or previously introduced polynucleotides encoding a silencing element disclosed herein in the genome of a plant may be edited using genome editing technologies. For example, the disclosed polynucleotides can be introduced into a desired location in the genome of a plant through the use of double-stranded break technologies such as TALENs, meganucleases, zinc finger nucleases, CRISPR-Cas, and the like. For example, the disclosed polynucleotides can be introduced into a desired location in a genome using a CRISPR-Cas system, for the purpose of site-specific insertion. The desired location in a plant genome can be any desired target site for insertion, such as a genomic region amenable for breeding or may be a target site located in a genomic window with an existing trait of interest. Existing traits of interest could be either an endogenous trait or a previously introduced trait.

[0235] In another aspect, where the disclosed polynucleotide encoding a silencing element has previously been introduced into a genome, genome editing technologies may be used to alter or modify the introduced polynucleotide sequence. Site specific modifications that can be introduced into the disclosed polynucleotide encoding a silencing element compositions include those produced using any method for introducing site specific modification, including, but not limited to, through the use of gene repair oligonucleotides (e.g. US Publication 2013/0019349), or through the use of double-stranded break technologies such as TALENs, meganucleases, zinc finger nucleases, CRISPR-Cas, and the like. Such technologies can be used to modify the previously introduced polynucleotide through the insertion, deletion or substitution of nucleotides within the introduced polynucleotide. Alternatively, double-stranded break technologies can be used to add additional nucleotide sequences to the introduced polynucleotide. Additional sequences that may be added include, additional expression elements, such as enhancer and promoter sequences. In another embodiment, genome editing technologies may be used to position additional insecticidally-active proteins in close proximity to the disclosed polynucleotide compositions disclosed herein within the genome of a plant, in order to generate molecular stacks of insecticidally-active proteins. An “altered target site,” “altered target sequence,” “modified target site,” and “modified target sequence” are used interchangeably herein and refer to a target sequence as disclosed herein that comprises at least one alteration when compared to non-altered target sequence. Such “alterations” include, for example: (i) replacement of at least one nucleotide, (ii) a deletion of at least one nucleotide, (iii) an insertion of at least one nucleotide, or (iv) any combination of (i)-(iii).

[0236] All publications and patent applications mentioned in the specification are indicative of the level of those skilled in the art to which this invention pertains. All publications and patent applications are herein incorporated by reference to the same extent as if each individual publication or patent application was specifically and individually indicated to be incorporated by reference.

[0237] Although the foregoing embodiments have been described in some detail by way of illustration and example for purposes of clarity of understanding, certain changes and modifications may be practiced within the scope of the appended claims.

[0238] The following examples are offered by way of illustration and not by way of limitation.

### EXPERIMENTAL

### Example 1: Nucleic Acid Sequences

[0239] Nucleic acid sequences disclosed herein comprise the following nucleic acid sequences.

[0240] Certain sequences are exemplary and are expected to show insecticidal activity against insect pests using the assay methods described in Examples as set forth below. Such sequences or their complements can be used in the methods as described herein above and below. DNA constructs, vectors, transgenic cells, plants, seeds or products described herein may comprise one or more of the following nucleic acid sequences, or a portion of one or more of the disclosed sequences. Non-limiting examples of target polynucleotides are set forth below in Table 1, or variants and fragments thereof, and complements thereof, including, for example, SEQ ID NOS.: 1-398, and variants and fragments thereof, and complements thereof.

TABLE 1
List of Target Sequences and Orthologs Identified By Homologous Sequence Search

| Annotated | | | SEQ |
|---|---|---|---|
| Gene Name | Common Name | Scientific Name | ID NO: |
| Dv_Argonaute-1 | Western corn rootworm | Diabrotica virgifera virgifera | 1 |
| Dv_Ataxin-2 | Western corn rootworm | Diabrotica virgifera virgifera | 2 |
| Dv_Dcp1 | Western corn rootworm | Diabrotica virgifera virgifera | 3 |
| Dv_Dcp2 | Western corn rootworm | Diabrotica virgifera virgifera | 4 |
| Dv_Dicer-1 | Western corn rootworm | Diabrotica virgifera virgifera | 5 |
| Dv_Drosha | Western corn rootworm | Diabrotica virgifera virgifera | 6 |
| Dv_Fmr1 | Western corn rootworm | Diabrotica virgifera virgifera | 7 |
| Dv_Gawky.1 | Western corn rootworm | Diabrotica virgifera virgifera | 8 |
| Dv_Gawky.2 | Western corn rootworm | Diabrotica virgifera virgifera | 9 |
| Dv_hsc70-2 | Western corn rootworm | Diabrotica virgifera virgifera | 10 |
| Dv_hsc70-3 | Western corn rootworm | Diabrotica virgifera virgifera | 11 |
| Dv_hsc70-4 | Western corn rootworm | Diabrotica virgifera virgifera | 12 |
| Dv_Nbr | Western corn rootworm | Diabrotica virgifera virgifera | 13 |
| Dv_pasha-PB | Western corn rootworm | Diabrotica virgifera virgifera | 14 |
| Dv_Ranbp21-PA | Western corn rootworm | Diabrotica virgifera virgifera | 15 |
| Dv_Tdrd-3 | Western corn rootworm | Diabrotica virgifera virgifera | 16 |
| Dv_Ars2 | Western corn rootworm | Diabrotica virgifera virgifera | 17 |
| Dv_Dicer-2 | Western corn rootworm | Diabrotica virgifera virgifera | 18 |
| Dv_Hen1 | Western corn rootworm | Diabrotica virgifera virgifera | 19 |
| Dv_R2D2 | Western corn rootworm | Diabrotica virgifera virgifera | 20 |
| Dv_Translin-PA | Western corn rootworm | Diabrotica virgifera virgifera | 21 |
| Dv_Tudor-SN | Western corn rootworm | Diabrotica virgifera virgifera | 22 |
| Dv_vig.1 | Western corn rootworm | Diabrotica virgifera virgifera | 23 |
| Dv_vig.2 | Western corn rootworm | Diabrotica virgifera virgifera | 24 |
| Dv_Argonaute-3 | Western corn rootworm | Diabrotica virgifera virgifera | 25 |
| Dv_capsuleen | Western corn rootworm | Diabrotica virgifera virgifera | 26 |
| Dv_hsp83.1 | Western corn rootworm | Diabrotica virgifera virgifera | 27 |
| Dv_hsp83.2 | Western corn rootworm | Diabrotica virgifera virgifera | 28 |
| Dv_hsp83b.1 | Western corn rootworm | Diabrotica virgifera virgifera | 29 |
| Dv_hsp83b.2 | Western corn rootworm | Diabrotica virgifera virgifera | 30 |
| Dv_mov-10 | Western corn rootworm | Diabrotica virgifera virgifera | 31 |
| Dv_mov-10B | Western corn rootworm | Diabrotica virgifera virgifera | 32 |
| Dv_Piwi | Western corn rootworm | Diabrotica virgifera virgifera | 33 |
| Dv_Tapas-PB | Western corn rootworm | Diabrotica virgifera virgifera | 34 |
| Dv_Tejas-PA | Western corn rootworm | Diabrotica virgifera virgifera | 35 |
| Dv_rhino | Western corn rootworm | Diabrotica virgifera virgifera | 36 |
| Dv_shutdown | Western corn rootworm | Diabrotica virgifera virgifera | 37 |
| Dv_shutdownb-like | Western corn rootworm | Diabrotica virgifera virgifera | 38 |
| Dv_Spindle-E | Western corn rootworm | Diabrotica virgifera virgifera | 39 |
| Dv_UAP56 | Western corn rootworm | Diabrotica virgifera virgifera | 40 |
| Dv_UNC-130.1 | Western corn rootworm | Diabrotica virgifera virgifera | 41 |
| Dv_UNC-130.2 | Western corn rootworm | Diabrotica virgifera virgifera | 42 |
| Dv_UNC-130-like.1 | Western corn rootworm | Diabrotica virgifera virgifera | 43 |
| Dv_UNC-130-like.2 | Western corn rootworm | Diabrotica virgifera virgifera | 44 |
| Dv_Zucchini_partial | Western corn rootworm | Diabrotica virgifera virgifera | 45 |
| Dv_ABCB8-Mdr49 | Western corn rootworm | Diabrotica virgifera virgifera | 46 |
| Dv_eater-PC | Western corn rootworm | Diabrotica virgifera virgifera | 47 |
| Dv_Lqf | Western corn rootworm | Diabrotica virgifera virgifera | 48 |
| Dv_Sr_CI-PB | Western corn rootworm | Diabrotica virgifera virgifera | 49 |
| Dv_SilA | Western corn rootworm | Diabrotica virgifera virgifera | 50 |
| Dv_SilB | Western corn rootworm | Diabrotica virgifera virgifera | 51 |
| Dv_Vha44-PA | Western corn rootworm | Diabrotica virgifera virgifera | 52 |
| Dv_Caf1-55-PB | Western corn rootworm | Diabrotica virgifera virgifera | 53 |
| Dv_Cid1 | Western corn rootworm | Diabrotica virgifera virgifera | 54 |
| Dv_DDX4 | Western corn rootworm | Diabrotica virgifera virgifera | 55 |
| Dv_DEAD-hel-N | Western corn rootworm | Diabrotica virgifera virgifera | 56 |
| Dv_Dead-hel | Western corn rootworm | Diabrotica virgifera virgifera | 57 |
| Dv_DNA2-like | Western corn rootworm | Diabrotica virgifera virgifera | 58 |
| Dv_EHMT1-like | Western corn rootworm | Diabrotica virgifera virgifera | 59 |
| Dv_EIF4E.1 | Western corn rootworm | Diabrotica virgifera virgifera | 60 |
| Dv_EIF4E.2 | Western corn rootworm | Diabrotica virgifera virgifera | 61 |
| Dv_EIF4E.3 | Western corn rootworm | Diabrotica virgifera virgifera | 62 |
| Dv_eIF4F | Western corn rootworm | Diabrotica virgifera virgifera | 63 |
| Dv_FKH-3a.1 | Western corn rootworm | Diabrotica virgifera virgifera | 64 |
| Dv_FKH-3a.2 | Western corn rootworm | Diabrotica virgifera virgifera | 65 |
| Dv_FOXK2 | Western corn rootworm | Diabrotica virgifera virgifera | 66 |
| Dv_Ge-1 | Western corn rootworm | Diabrotica virgifera virgifera | 67 |
| Dv_gld-2.1 | Western corn rootworm | Diabrotica virgifera virgifera | 68 |
| Dv_gld-2.2 | Western corn rootworm | Diabrotica virgifera virgifera | 69 |
| Dv_HPL-2a-A | Western corn rootworm | Diabrotica virgifera virgifera | 70 |
| Dv_IGF-II-PK | Western corn rootworm | Diabrotica virgifera virgifera | 71 |
| Dv_MCM-7 | Western corn rootworm | Diabrotica virgifera virgifera | 72 |
| Dv_MES-4.1 | Western corn rootworm | Diabrotica virgifera virgifera | 73 |
| Dv_MES-4.2 | Western corn rootworm | Diabrotica virgifera virgifera | 74 |
| Dv_mtPAP | Western corn rootworm | Diabrotica virgifera virgifera | 75 |
| Dv_Not1 | Western corn rootworm | Diabrotica virgifera virgifera | 76 |
| Dv_Pacman.1 | Western corn rootworm | Diabrotica virgifera virgifera | 77 |
| Dv_Pacman.2 | Western corn rootworm | Diabrotica virgifera virgifera | 78 |
| Dv_PRP28 | Western corn rootworm | Diabrotica virgifera virgifera | 79 |
| Dv_RTNG/FYVE/ | Western corn rootworm | Diabrotica virgifera virgifera | 80 |
| PHD-type.1 | | | |
| Dv_RING/FYVE/ | Western corn rootworm | Diabrotica virgifera virgifera | 81 |
| PHD-type.2 | | | |
| Dv_Sen1 | Western corn rootworm | Diabrotica virgifera virgifera | 82 |
| Dv_SET-25.1 | Western corn rootworm | Diabrotica virgifera virgifera | 83 |
| Dv_SET-25.2 | Western corn rootworm | Diabrotica virgifera virgifera | 84 |
| Dv_Snipper_partial | Western corn rootworm | Diabrotica virgifera virgifera | 85 |
| Dv_Staufen | Western corn rootworm | Diabrotica virgifera virgifera | 86 |
| Dv_Twin | Western corn rootworm | Diabrotica virgifera virgifera | 87 |
| Dv_UPF-like | Western corn rootworm | Diabrotica virgifera virgifera | 88 |
| Dv_ANKRD28 | Western corn rootworm | Diabrotica virgifera virgifera | 89 |
| Dv_CCPAP.1 | Western corn rootworm | Diabrotica virgifera virgifera | 90 |
| Dv_CCPAP.2 | Western corn rootworm | Diabrotica virgifera virgifera | 91 |
| Dv_CCPAP.3 | Western corn rootworm | Diabrotica virgifera virgifera | 92 |
| Dv_Cubilin | Western corn rootworm | Diabrotica virgifera virgifera | 93 |
| Dv_CCDC113-like | Western corn rootworm | Diabrotica virgifera virgifera | 94 |
| Dv_Ecdysteroid_kinase | Western corn rootworm | Diabrotica virgifera virgifera | 95 |
| Dv_LTK | Western corn rootworm | Diabrotica virgifera virgifera | 96 |
| Dv_Mdr50 | Western corn rootworm | Diabrotica virgifera virgifera | 97 |
| Dv_Mdr50-like.1 | Western corn rootworm | Diabrotica virgifera virgifera | 98 |
| Dv_Mdr50-like_partial.1 | Western corn rootworm | Diabrotica virgifera virgifera | 99 |
| Dv_Mdr50-like_partial.2 | Western corn rootworm | Diabrotica virgifera virgifera | 100 |
| Dv_Mdr50-like_partial.3 | Western corn rootworm | Diabrotica virgifera virgifera | 101 |
| Dv_Mdr50-like_partial.4 | Western corn rootworm | Diabrotica virgifera virgifera | 102 |
| Dv_Mdr50-like_partial.5 | Western corn rootworm | Diabrotica virgifera virgifera | 103 |
| Dv_Mdr50-like_partial.6 | Western corn rootworm | Diabrotica virgifera virgifera | 104 |
| Dv_Ncl-1 | Western corn rootworm | Diabrotica virgifera virgifera | 105 |
| Sf_Argonaute-1.1 | Fall armyworm | Spodoptera frugiperda | 106 |
| Sf_Argonaute-1.2 | Fall armyworm | Spodoptera frugiperda | 107 |
| Sf_Argonaute-1.3 | Fall armyworm | Spodoptera frugiperda | 108 |
| Sf_armitage-2 | Fall armyworm | Spodoptera frugiperda | 109 |
| Sf_armitage-2-like.1 | Fall armyworm | Spodoptera frugiperda | 110 |
| Sf_Ataxin-2 | Fall armyworm | Spodoptera frugiperda | 111 |
| Sf_Dcp1 | Fall armyworm | Spodoptera frugiperda | 112 |
| Sf_Dcp2-PB | Fall armyworm | Spodoptera frugiperda | 113 |
| Sf_Dicer-1 | Fall armyworm | Spodoptera frugiperda | 114 |
| Sf_Drosha | Fall armyworm | Spodoptera frugiperda | 115 |
| Sf_HPS4 | Fall armyworm | Spodoptera frugiperda | 116 |
| Sf_Fmr1-PE-like | Fall armyworm | Spodoptera frugiperda | 117 |
| Sf_Fmr1-PB-like.1 | Fall armyworm | Spodoptera frugiperda | 118 |
| Sf_Fmr1-PB-like.2 | Fall armyworm | Spodoptera frugiperda | 119 |
| Sf_Gawky.1 | Fall armyworm | Spodoptera frugiperda | 120 |
| Sf_Hsp70 | Fall armyworm | Spodoptera frugiperda | 121 |
| Sf_Hsp70Bb | Fall armyworm | Spodoptera frugiperda | 122 |
| Sf_Hsc70-4 | Fall armyworm | Spodoptera frugiperda | 123 |
| Sf_Loquacious.1 | Fall armyworm | Spodoptera frugiperda | 124 |
| Sf_Loquacious.2 | Fall armyworm | Spodoptera frugiperda | 125 |
| Sf_Loquacious.3 | Fall armyworm | Spodoptera frugiperda | 126 |
| Sf_Loquacious.4 | Fall armyworm | Spodoptera frugiperda | 127 |
| Sf_Loquacious.4 | Fall armyworm | Spodoptera frugiperda | 128 |
| Sf_Loquacious.6 | Fall armyworm | Spodoptera frugiperda | 129 |
| Sf_Loquacious.7 | Fall armyworm | Spodoptera frugiperda | 130 |
| Sf_ME31B.1 | Fall armyworm | Spodoptera frugiperda | 131 |
| Sf_ME31B.2 | Fall armyworm | Spodoptera frugiperda | 132 |
| Sf_ME31B.3 | Fall armyworm | Spodoptera frugiperda | 133 |
| Sf_mei-P26 | Fall armyworm | Spodoptera frugiperda | 134 |
| Sf_Nbr.1 | Fall armyworm | Spodoptera frugiperda | 135 |
| Sf_Nbr.2 | Fall armyworm | Spodoptera frugiperda | 136 |
| Sf_Pasha.1 | Fall armyworm | Spodoptera frugiperda | 137 |
| Sf_Pasha.2 | Fall armyworm | Spodoptera frugiperda | 138 |
| Sf_Pasha.3 | Fall armyworm | Spodoptera frugiperda | 139 |
| Sf_Pasha.4 | Fall armyworm | Spodoptera frugiperda | 140 |
| Sf_Pasha.5 | Fall armyworm | Spodoptera frugiperda | 141 |
| Sf_Pasha.6 | Fall armyworm | Spodoptera frugiperda | 142 |
| Sf_Pasha.7 | Fall armyworm | Spodoptera frugiperda | 143 |
| Sf_Ranbp21 | Fall armyworm | Spodoptera frugiperda | 144 |
| Sf_Ranbp21-PA | Fall armyworm | Spodoptera frugiperda | 145 |
| Sf_Tdrd-3 | Fall armyworm | Spodoptera frugiperda | 146 |
| Sf_Argonaute-2.1 | Fall armyworm | Spodoptera frugiperda | 147 |
| Sf_Argonaute-2.2 | Fall armyworm | Spodoptera frugiperda | 148 |
| Sf_Ars2 | Fall armyworm | Spodoptera frugiperda | 149 |
| Sf_Ars2-PF-like | Fall armyworm | Spodoptera frugiperda | 150 |
| Sf_Dicer-2 | Fall armyworm | Spodoptera frugiperda | 151 |
| Sf_Hen1 | Fall armyworm | Spodoptera frugiperda | 152 |
| Sf_Hen1-like.1 | Fall armyworm | Spodoptera frugiperda | 153 |
| Sf_Hen1-like.2 | Fall armyworm | Spodoptera frugiperda | 154 |
| Sf_R2D2.1 | Fall armyworm | Spodoptera frugiperda | 155 |
| Sf_R2D2.2 | Fall armyworm | Spodoptera frugiperda | 156 |
| Sf_R2D2.3 | Fall armyworm | Spodoptera frugiperda | 157 |
| Sf_R2D2.4 | Fall armyworm | Spodoptera frugiperda | 158 |
| Sf_Translin | Fall armyworm | Spodoptera frugiperda | 159 |
| Sf_TRAX | Fall armyworm | Spodoptera frugiperda | 160 |
| Sf_Tudor-SN | Fall armyworm | Spodoptera frugiperda | 161 |
| Sf_Tudor-SN-like | Fall armyworm | Spodoptera frugiperda | 162 |
| Sf_vig | Fall armyworm | Spodoptera frugiperda | 163 |
| Sf_Argonaute-3 | Fall armyworm | Spodoptera frugiperda | 164 |
| Sf_Aubergine | Fall armyworm | Spodoptera frugiperda | 165 |
| Sf_Belle | Fall armyworm | Spodoptera frugiperda | 166 |
| Sf_Capsuleen | Fall armyworm | Spodoptera frugiperda | 167 |
| Sf_Capsuleen-like | Fall armyworm | Spodoptera frugiperda | 168 |
| Sf_hsp83-like.1 | Fall armyworm | Spodoptera frugiperda | 169 |
| Sf_hsp83-like.2 | Fall armyworm | Spodoptera frugiperda | 170 |
| Sf_hsp83-like.3 | Fall armyworm | Spodoptera frugiperda | 171 |
| Sf_hsp83-like.4 | Fall armyworm | Spodoptera frugiperda | 172 |
| Sf_Maelsrom | Fall armyworm | Spodoptera frugiperda | 173 |
| Sf_mov-10-like.1 | Fall armyworm | Spodoptera frugiperda | 174 |
| Sf_mov-10-like.2 | Fall armyworm | Spodoptera frugiperda | 175 |
| Sf_mov-10-like.3 | Fall armyworm | Spodoptera frugiperda | 176 |
| Sf_mov-10-like.4 | Fall armyworm | Spodoptera frugiperda | 177 |
| Sf_mov-10-like.5 | Fall armyworm | Spodoptera frugiperda | 178 |
| Sf_mov-10-like.6 | Fall armyworm | Spodoptera frugiperda | 179 |
| Sf_piwi | Fall armyworm | Spodoptera frugiperda | 180 |
| Sf_Rhino-like.1 | Fall armyworm | Spodoptera frugiperda | 181 |
| Sf_Rhino-like.2 | Fall armyworm | Spodoptera frugiperda | 182 |
| Sf_Shutdown | Fall armyworm | Spodoptera frugiperda | 183 |
| Sf_Shutdownb-like.1 | Fall armyworm | Spodoptera frugiperda | 184 |
| Sf_Shutdownb-like.2 | Fall armyworm | Spodoptera frugiperda | 185 |
| Sf_Shutdownb-like.3 | Fall armyworm | Spodoptera frugiperda | 186 |
| Sf_Spindle-E.1 | Fall armyworm | Spodoptera frugiperda | 187 |
| Sf_Spindle-E.2 | Fall armyworm | Spodoptera frugiperda | 188 |
| Sf_Tapas-PB | Fall armyworm | Spodoptera frugiperda | 189 |
| Sf_Tudor | Fall armyworm | Spodoptera frugiperda | 190 |
| Sf_Zucchini | Fall armyworm | Spodoptera frugiperda | 191 |
| Sf_ABCB8-Mdr49/ | Fall armyworm | Spodoptera frugiperda | 192 |
| 50-like | | | |
| Sf_Eater-PC_partial.1 | Fall armyworm | Spodoptera frugiperda | 193 |
| Sf_Eater-PC_partial.2 | Fall armyworm | Spodoptera frugiperda | 194 |
| Sf_Lqf-PC | Fall armyworm | Spodoptera frugiperda | 195 |
| Sf_Mdr-50 | Fall armyworm | Spodoptera frugiperda | 196 |
| Sf_Sil-1A.1 | Fall armyworm | Spodoptera frugiperda | 197 |
| Sf_Sil-1A.2 | Fall armyworm | Spodoptera frugiperda | 198 |
| Sf_Sid-1A.3 | Fall armyworm | Spodoptera frugiperda | 199 |
| Sf_Sil-1B | Fall armyworm | Spodoptera frugiperda | 200 |
| Sf_Sil-1C | Fall armyworm | Spodoptera frugiperda | 201 |
| Sf_Sr-CI-PA | Fall armyworm | Spodoptera frugiperda | 202 |
| Sf_Vha44-PA | Fall armyworm | Spodoptera frugiperda | 203 |
| Sf_Vha44-PB | Fall armyworm | Spodoptera frugiperda | 204 |
| Sf_Vha44-PC | Fall armyworm | Spodoptera frugiperda | 205 |
| Sf_AAA-domain- | Fall armyworm | Spodoptera frugiperda | 206 |
| containing_partial | | | |
| Sf_Caf1-55-PA_ | Fall armyworm | Spodoptera frugiperda | 207 |
| DROME | | | |
| Sf_Crocodile | Fall armyworm | Spodoptera frugiperda | 208 |
| Sf_DNA2-like | Fall armyworm | Spodoptera frugiperda | 209 |
| Sf_eIF4E | Fall armyworm | Spodoptera frugiperda | 210 |
| Sf_eIF4E-like.1 | Fall armyworm | Spodoptera frugiperda | 211 |
| Sf_eIF4E-like.2 | Fall armyworm | Spodoptera frugiperda | 212 |
| Sf_eIF4E-like.3 | Fall armyworm | Spodoptera frugiperda | 213 |
| Sf_eIF2γ | Fall armyworm | Spodoptera frugiperda | 214 |
| Sf_EHMT2 | Fall armyworm | Spodoptera frugiperda | 215 |
| Sf_EHMT2-like | Fall armyworm | Spodoptera frugiperda | 216 |
| Sf_FOXD3 | Fall armyworm | Spodoptera frugiperda | 217 |
| Sf_FOXG1-like | Fall armyworm | Spodoptera frugiperda | 218 |
| Sf_Ge-1.1 | Fall armyworm | Spodoptera frugiperda | 219 |
| Sf_Ge-1.2 | Fall armyworm | Spodoptera frugiperda | 220 |
| Sf_HPL-2A.1 | Fall armyworm | Spodoptera frugiperda | 221 |
| Sf_IGF-II-PA-like.1 | Fall armyworm | Spodoptera frugiperda | 222 |
| Sf_IGF-II-PK-like.2 | Fall armyworm | Spodoptera frugiperda | 223 |
| Sf_MUT-2a-like.1 | Fall armyworm | Spodoptera frugiperda | 224 |
| Sf_MUT-2a-like.2 | Fall armyworm | Spodoptera frugiperda | 225 |
| Sf_Not1 | Fall armyworm | Spodoptera frugiperda | 226 |
| Sf_Pacman | Fall armyworm | Spodoptera frugiperda | 227 |
| Sf_RNA-helicase-like | Fall armyworm | Spodoptera frugiperda | 228 |
| Sf_SETMAR-like.1 | Fall armyworm | Spodoptera frugiperda | 229 |
| Sf_SETMAR-like.2 | Fall armyworm | Spodoptera frugiperda | 230 |
| Sf_slp2-like | Fall armyworm | Spodoptera frugiperda | 231 |
| Sf_Staufen.1 | Fall armyworm | Spodoptera frugiperda | 232 |
| Sf_Staufen.2 | Fall armyworm | Spodoptera frugiperda | 233 |
| Sf_STAU2-like_partial.1 | Fall armyworm | Spodoptera frugiperda | 234 |
| Sf_STAU2-like_partial.2 | Fall armyworm | Spodoptera frugiperda | 235 |
| Sf_STAU2-like_partial.3 | Fall armyworm | Spodoptera frugiperda | 236 |
| Sf_Twin | Fall armyworm | Spodoptera frugiperda | 237 |
| Sf_UPF1 | Fall armyworm | Spodoptera frugiperda | 238 |
| Sf_UPF1_partial.1 | Fall armyworm | Spodoptera frugiperda | 239 |
| Sf_ABCB1-like.1 | Fall armyworm | Spodoptera frugiperda | 240 |
| Sf_ABCB1-like.2 | Fall armyworm | Spodoptera frugiperda | 241 |
| Sf_Cubilin | Fall armyworm | Spodoptera frugiperda | 242 |
| Sf_FYRN-protein | Fall armyworm | Spodoptera frugiperda | 243 |
| Sf_Mdr65-like_partial.1 | Fall armyworm | Spodoptera frugiperda | 244 |
| Sf_Mdr65-like_partial.2 | Fall armyworm | Spodoptera frugiperda | 245 |
| NV_Argonaute-1 | Southern green stinkbug | Nezara viridula | 246 |
| NV_Armitage-like_ | Southern green stinkbug | Nezara viridula | 247 |
| partial.1 | | | |
| NV_Armitage-like_ | Southern green stinkbug | Nezara viridula | 248 |
| partial.2 | | | |
| NV_Ataxin-2 | Southern green stinkbug | Nezara viridula | 249 |
| NV_Dcp1 | Southern green stinkbug | Nezara viridula | 250 |
| NV_Dcp2.1 | Southern green stinkbug | Nezara viridula | 251 |
| NV_Dcp2_partial | Southern green stinkbug | Nezara viridula | 252 |
| NV_Dicer-1 | Southern green stinkbug | Nezara viridula | 253 |
| NV_Drosha | Southern green stinkbug | Nezara viridula | 254 |
| NV_Gawky | Southern green stinkbug | Nezara viridula | 255 |
| NV_Hsp70-S1 | Southern green stinkbug | Nezara viridula | 256 |
| NV_Hsp70_partial | Southern green stinkbug | Nezara viridula | 257 |
| NV_Hsp70B | Southern green stinkbug | Nezara viridula | 258 |
| NV_Loquacious | Southern green stinkbug | Nezara viridula | 259 |
| NV_ME31B_partial | Southern green stinkbug | Nezara viridula | 260 |
| NV_Nbr | Southern green stinkbug | Nezara viridula | 261 |
| NV_pasha.1 | Southern green stinkbug | Nezara viridula | 262 |
| NV_pasha.2 | Southern green stinkbug | Nezara viridula | 263 |
| NV_pasha.3 | Southern green stinkbug | Nezara viridula | 264 |
| NV_Ranbp21-PA | Southern green stinkbug | Nezara viridula | 265 |
| NV_Tdrd-3_partial | Southern green stinkbug | Nezara viridula | 266 |
| NV_Unknown_protein.1 | Southern green stinkbug | Nezara viridula | 267 |
| NV_Argonaute-2 | Southern green stinkbug | Nezara viridula | 268 |
| NV_Argonaute-2b | Southern green stinkbug | Nezara viridula | 269 |
| NV_Argonaute-2b-like | Southern green stinkbug | Nezara viridula | 270 |
| NV_Ars2 | Southern green stinkbug | Nezara viridula | 271 |
| NV_Dicer-2 | Southern green stinkbug | Nezara viridula | 272 |
| NV_Hen1 | Southern green stinkbug | Nezara viridula | 273 |
| NV_R2D2.1 | Southern green stinkbug | Nezara viridula | 274 |
| NV_R2D2.2 | Southern green stinkbug | Nezara viridula | 275 |
| NV_R2D2.3 | Southern green stinkbug | Nezara viridula | 276 |
| NV_R2D2.4 | Southern green stinkbug | Nezara viridula | 277 |
| NV_R2D2.5 | Southern green stinkbug | Nezara viridula | 278 |
| NV_R2D2.6 | Southern green stinkbug | Nezara viridula | 279 |
| NV_R2D2.7 | Southern green stinkbug | Nezara viridula | 280 |
| NV_Translin | Southern green stinkbug | Nezara viridula | 281 |
| NV_TRAX | Southern green stinkbug | Nezara viridula | 282 |
| NV_Tudor-SN | Southern green stinkbug | Nezara viridula | 283 |
| NV_vig_partial | Southern green stinkbug | Nezara viridula | 284 |
| NV_Argonaute-3 | Southern green stinkbug | Nezara viridula | 285 |
| NV_Aubergine.1 | Southern green stinkbug | Nezara viridula | 286 |
| NV_Aubergine.2 | Southern green stinkbug | Nezara viridula | 287 |
| NV_Aubergine.3 | Southern green stinkbug | Nezara viridula | 288 |
| NV_Belle_partial.1 | Southern green stinkbug | Nezara viridula | 289 |
| NV_Belle_partial.2 | Southern green stinkbug | Nezara viridula | 290 |
| NV_Capsuleen | Southern green stinkbug | Nezara viridula | 291 |
| NV_HSP83_partial | Southern green stinkbug | Nezara viridula | 292 |
| NV_HSP83_partial.2 | Southern green stinkbug | Nezara viridula | 293 |
| NV_HSP83b | Southern green stinkbug | Nezara viridula | 294 |
| NV_KH-domain_partial | Southern green stinkbug | Nezara viridula | 295 |
| NV_KH-domain-repeat | Southern green stinkbug | Nezara viridula | 296 |
| NV_Maelstrom | Southern green stinkbug | Nezara viridula | 297 |
| NV_Piwi_partial | Southern green stinkbug | Nezara viridula | 298 |
| NV_Rhino_partial | Southern green stinkbug | Nezara viridula | 299 |
| NV_shutdown.1 | Southern green stinkbug | Nezara viridula | 300 |
| NV_shutdown.2 | Southern green stinkbug | Nezara viridula | 301 |
| NV_shutdown_partial | Southern green stinkbug | Nezara viridula | 302 |
| NV_shutdownb | Southern green stinkbug | Nezara viridula | 303 |
| NV_Spindle-E | Southern green stinkbug | Nezara viridula | 304 |
| NV_Tapas-PF | Southern green stinkbug | Nezara viridula | 305 |
| NV_TDRKH-like | Southern green stinkbug | Nezara viridula | 306 |
| NV_Tejas | Southern green stinkbug | Nezara viridula | 307 |
| NV_Tudor_partial | Southern green stinkbug | Nezara viridula | 308 |
| NV_Zucchini.1 | Southern green stinkbug | Nezara viridula | 309 |
| NV_Zucchini.2 | Southern green stinkbug | Nezara viridula | 310 |
| NV_ABCB8 | Southern green stinkbug | Nezara viridula | 311 |
| NV_ABCB8-like_partial | Southern green stinkbug | Nezara viridula | 312 |
| NV_ABC4 | Southern green stinkbug | Nezara viridula | 313 |
| NV_ABC4-like_partial | Southern green stinkbug | Nezara viridula | 314 |
| NV_ABC_trans_partial.1 | Southern green stinkbug | Nezara viridula | 315 |
| NV_ABC_trans_partial.2 | Southern green stinkbug | Nezara viridula | 316 |
| NV_ABC_trans_partial.3 | Southern green stinkbug | Nezara viridula | 317 |
| NV_ABC_trans_partial.4 | Southern green stinkbug | Nezara viridula | 318 |
| NV_eater-PC_partial.1 | Southern green stinkbug | Nezara viridula | 319 |
| NV_eater-PC_partial.2 | Southern green stinkbug | Nezara viridula | 320 |
| NV_eater-PC_partial.3 | Southern green stinkbug | Nezara viridula | 321 |
| NV_Epsin-N-term- | Southern green stinkbug | Nezara viridula | 322 |
| containing protein | | | |
| NV_Lqf | Southern green stinkbug | Nezara viridula | 323 |
| NV_Lqf-2-like | Southern green stinkbug | Nezara viridula | 324 |
| NV_PICALM | Southern green stinkbug | Nezara viridula | 325 |
| NV_SilA_partial | Southern green stinkbug | Nezara viridula | 326 |
| NV_Sr_CI-PB | Southern green stinkbug | Nezara viridula | 327 |
| NV_MAM-domain-repeat | Southern green stinkbug | Nezara viridula | 328 |
| NV_Vha44 | Southern green stinkbug | Nezara viridula | 329 |
| NV_Vha44-like | Southern green stinkbug | Nezara viridula | 330 |
| NV_Adar.1 | Southern green stinkbug | Nezara viridula | 331 |
| NV_Adar.2 | Southern green stinkbug | Nezara viridula | 332 |
| NV_BRAT | Southern green stinkbug | Nezara viridula | 333 |
| NV_Caf1-55-PA | Southern green stinkbug | Nezara viridula | 334 |
| NV_C2H2-zf-protein | Southern green stinkbug | Nezara viridula | 335 |
| NV_DDX5-like_partial.1 | Southern green stinkbug | Nezara viridula | 336 |
| NV_DDX5-like_partial.2 | Southern green stinkbug | Nezara viridula | 337 |
| NV_DDX17-like_partial | Southern green stinkbug | Nezara viridula | 338 |
| NV_DEAD-hel_partial | Southern green stinkbug | Nezara viridula | 339 |
| NV_DEAD-hel-N_partial | Southern green stinkbug | Nezara viridula | 340 |
| NV_DHX15-like | Southern green stinkbug | Nezara viridula | 341 |
| NV_DHX16 | Southern green stinkbug | Nezara viridula | 342 |
| NV_DHX34 | Southern green stinkbug | Nezara viridula | 343 |
| NV_DNA2_partial | Southern green stinkbug | Nezara viridula | 344 |
| NV_DsRBP-like | Southern green stinkbug | Nezara viridula | 345 |
| NV_eIF4A | Southern green stinkbug | Nezara viridula | 346 |
| NV_eIF4A | Southern green stinkbug | Nezara viridula | 347 |
| NV_eIF4A-like | Southern green stinkbug | Nezara viridula | 348 |
| NV_eIF4AIII | Southern green stinkbug | Nezara viridula | 349 |
| NV_EIF4E-like | Southern green stinkbug | Nezara viridula | 350 |
| NV_EIF4E2 | Southern green stinkbug | Nezara viridula | 351 |
| NV_EIF4E.1 | Southern green stinkbug | Nezara viridula | 352 |
| NV_EIF4E.2 | Southern green stinkbug | Nezara viridula | 353 |
| NV_Exoribonuclease_ | Southern green stinkbug | Nezara viridula | 354 |
| partial | | | |
| NV_FOXD3_partial | Southern green stinkbug | Nezara viridula | 355 |
| NV_FOX_partial | Southern green stinkbug | Nezara viridula | 356 |
| NV_FUBP1 | Southern green stinkbug | Nezara viridula | 357 |
| NV_Ge-1 | Southern green stinkbug | Nezara viridula | 358 |
| NV_gld-2 | Southern green stinkbug | Nezara viridula | 359 |
| NV_HAT1 | Southern green stinkbug | Nezara viridula | 360 |
| NV_IGF-II | Southern green stinkbug | Nezara viridula | 361 |
| NV_Mes-4 | Southern green stinkbug | Nezara viridula | 362 |
| NV_MTPAP | Southern green stinkbug | Nezara viridula | 363 |
| NV_Not1 | Southern green stinkbug | Nezara viridula | 364 |
| NV_NUDT1 | Southern green stinkbug | Nezara viridula | 365 |
| NV_PAB1.1 | Southern green stinkbug | Nezara viridula | 366 |
| NV_PAB1.2 | Southern green stinkbug | Nezara viridula | 367 |
| NV_Pacman | Southern green stinkbug | Nezara viridula | 368 |
| NV_PAPD5 | Southern green stinkbug | Nezara viridula | 369 |
| NV_Rat1_partial | Southern green stinkbug | Nezara viridula | 370 |
| NV_RING/FYVE/ | Southern green stinkbug | Nezara viridula | 371 |
| PHD-type.2 | | | |
| NV_RRB1 | Southern green stinkbug | Nezara viridula | 372 |
| NV_RRM_partial- | Southern green stinkbug | Nezara viridula | 373 |
| unknown.1 | | | |
| NV_RRM_partial- | Southern green stinkbug | Nezara viridula | 374 |
| unknown.2 | | | |
| NV_SETMAR-like_ | Southern green stinkbug | Nezara viridula | 375 |
| partial | | | |
| NV_Staufen_partial | Southern green stinkbug | Nezara viridula | 376 |
| NV_TIA1 | Southern green stinkbug | Nezara viridula | 377 |
| NV_TUT1 | Southern green stinkbug | Nezara viridula | 378 |
| NV_Twin_partial-part1 | Southern green stinkbug | Nezara viridula | 379 |
| NV_Twin_partial-part2 | Southern green stinkbug | Nezara viridula | 380 |
| NV_U2SURP | Southern green stinkbug | Nezara viridula | 381 |
| NV_Unknown_protein.2 | Southern green stinkbug | Nezara viridula | 382 |
| NV_YTHDC2-like | Southern green stinkbug | Nezara viridula | 383 |
| NV_WM6 | Southern green stinkbug | Nezara viridula | 384 |
| NV_BESS-motif-protein | Southern green stinkbug | Nezara viridula | 385 |
| NV_ANKRD6 | Southern green stinkbug | Nezara viridula | 386 |
| NV_Ephrin_receptor | Southern green stinkbug | Nezara viridula | 387 |
| NV_GBA2 | Southern green stinkbug | Nezara viridula | 388 |
| NV_INPP1 | Southern green stinkbug | Nezara viridula | 389 |
| NV_PH-type_protein | Southern green stinkbug | Nezara viridula | 390 |
| NV_SIRT7_partial | Southern green stinkbug | Nezara viridula | 391 |
| NV_Vigilin | Southern green stinkbug | Nezara viridula | 392 |

### Example 2: WCRW dsRNA Production and Gene Suppression Analysis

[0241] Region(s) of WCRW genes were produced by PCR followed by in vitro transcription (IVT) to produce long double stranded RNAs using Ambion Megascript High Yield Transcription Kit (Thermo Fisher Scientific, Grand Island, N.Y.). Selected cDNA sequences were amplified by PCR using target specific primers to generate DNA template. The target specific primers also contained T7 RNA polymerase sites (T7 sequence at 5′ end of each primer). The IVT reaction products were quantified and incorporated into artificial insect diet for first-round IVT screening (FIS) as described below.

[0242] For gene expression analysis, RNA was extracted with Ambion MirVana miRNA Isolation Kit (Thermo Fisher Scientific, Waltham, Mass.), treated using the RNase-free DNase Kit (Qiagen, Hilden, Germany), and further column purified using the ISOLATE II RNA Mini Kit (Bioline, Taunton, Mass.). Real-time quantitative reverse-transcription PCR (RT-qPCR) was performed by first reverse-transcribing isolated RNA with SuperScript First-Strand Synthesis Kit for RT-PCR (Thermo Fisher Scientific) and then by running real-time PCR using SensiFAST Probe Lo-ROX master mix (Bioline). Normalized expression was derived by absolute quantification (Pfaffl, M. (2004) in A-Z of quantitative PCR, S. A. Bustin, Eds. p. 87-112) using two reference genes.

### Example 3: In Vitro Transcription (IVT) and dsRNA Insect Bioassays

[0243] Different target selection strategies were used to identify RNAi active targets with insecticidal activities in corn rootworm diet based assay. cDNA libraries were produced from western corn rootworm by standard methods. Selected cDNA sequences were amplified in a PCR using target specific primers to generate DNA template. The target specific primers also contain T7 RNA polymerase sites (T7 sequence at 5′ end of each primer). To identify additional genes from corn rootworm that had RNAi activity, transcriptome experiments were completed using Western corn rootworm (“WCRW;” Diabrotica virgifera), Fall Armyworm (“FAW;” Spodptera frugiperda), Southern green stinkbug (“SGSB;” Nezara viridula) Northern corn rootworm (“NCRW;” Diabrotica barberi), and Southern corn rootworm (“SCRW”; Diabrotica undecimpunctata). Homologous transcripts were identified and are listed in Table 1 (SEQ ID NOs. 106-392).

[0244] Region(s) of WCRW genes were produced by PCR followed by in vitro transcription (IVT) to produce long double stranded RNAs. The IVT reaction products were quantified and incorporated into artificial insect diet for first-round IVT screening (FIS) as described below. Briefly, dsRNAs were incorporated into standard WCRW artificial diet at a final concentration of 50 ppm in a 96 well microtiter plate format. A portion of the IVT reaction (300 ng/μl) were added to a given well of a 96 well microtiter plate. 25 μl of molten low-melt Western corn rootworm diet were added to the sample and shaken on an orbital shaker to mix the sample and diet. Once the diet solidified, either eight or 96 well plates were used for each RNA sample. Preconditioned 1^{st} instar WCRW (neonate insects are placed on neutral diet for 24 hours prior to transfer to test material) were added to the 96 well microtiter plates at a rate of 1-3 insects/well. Plates were first placed inside an incubator set at 25° C. and 88% RH. The assay was scored for mortality and stunting affects after 7 days and an average was determined based on assignment of numeric values to each category of impact (3=mortality, 2=severe stunting, 1=stunting, 0=no affect). The number reported in this and all diet assay tables reflect the average score across all observations. A score of 3 represents complete mortality across all observations. For example, a score of 2.5 would indicate half the wells demonstrating mortality and half scored as severe stunting. Representative primary assay (FIS) results show limited insecticidal activity for select targets, as shown in Table 2.

[0245] Gene expression analysis is shown in FIGS. 1 & 2 for WCRW larvae seven days after exposure to dsRNA against selected targets from Table 2 (Drosha, DCR-1, DCR-2, Pasha, R2D2, AGO1, SEQ ID NOs. 6, 5, 18, 14, 20, and 1, respectively) and Table 3. Three samples were collected per treatment at seven days post-exposure, each containing approximately 30 insects. The graphs show median normalized expression value for each treatment, with error bars representing the median absolute deviation.

TABLE 2
WCRW larval diet exposure bioassay at
50 ppm and gene suppression analysis

| | | | Larval |
|---|---|---|---|
| Target | Sequence | | Growth Score |
| Gene | ID NO: | Treatment | Average |
| | | Buffer control | 0.217 |
| GUS | 399 | dsRNA control | 0.394 |
| DCR-1 | 5 | Target | 0.337 |
| | | Buffer control | 0.521 |
| GUS | 399 | dsRNA control | 0.713 |
| Drosha | 6 | Target | 0.963 |
| DCR-2 | 18 | Target | 0.490 |
| AGO1 | 1 | Target | 0.835 |
| | | Buffer control | 0.352 |
| GUS | 399 | dsRNA control | 0.301 |
| Pasha | 14 | Target | 0.458 |
| R2D2 | 20 | Target | 0.506 |
| | | Buffer control | 0.214 |
| GUS | 399 | dsRNA control | 0.354 |
| ZUC | 45 | Target | 0.258 |
| AGO3 | 25 | Target | 0.745 |
| PIWI | 33 | Target | 0.511 |

Larval growth scores calculated by taking an average of 96 individual insect scores on a scale of 0-3, where 0 is no growth inhibition (i.e. normal body size compared to the control), and 3 is dead.
Buffer and GUS controls apply to targets appearing within the same section, with sections separated by blank lines.

TABLE 3
WCRW larval diet exposure bioassay at
50 ppm and gene suppression analysis

| | | | |
|---|---|---|---|
| | | Buffer control | 0.000 |
| GUS | 399 | dsRNA control | 0.000 |
| VIG | 23 & 24 | Target | 0.000 |
| Gawky | 8 & 9 | Target | 0.625 |
| Ataxin-2 | 2 | Target | 0.000 |
| Dcp1 | 3 | Target | 0.143 |
| Fmr1 | 7 | Target | 0.000 |
| Ranbp21 | 15 | Target | 0.125 |
| Ars2 | 17 | Target | 0.500 |
| Hen1 | 19 | Target | 0.000 |
| Translin | 21 | Target | 0.000 |
| Tudor-SN | 22 | Target | 0.000 |
| Capsuleen | 26 | Target | 0.000 |
| hsp83 | 27 & 28 | Target | 1.750 |
| hsp83b.1 | 29 | Target | 0.125 |
| Rhino | 36 | Target | 0.000 |
| HPL-2a-A | 70 | Target | 0.000 |
| Shutdownb-like | 38 | Target | 0.000 |
| Spindle-E | 39 | Target | 0.000 |
| FKH-3a.2 | 65 | Target | 0.000 |
| UNC-130.1 | 41 | Target | 0.000 |
| UNC-130.2 | 42 | Target | 0.000 |
| UNC-130-like.1 | 43 | Target | 0.000 |
| UNC-130-like.2 | 44 | Target | 0.875 |

Larval growth scores calculated by taking an average of 96* or 8 individual insect scores on a scale of 0-3, where 0 is no growth inhibition (i.e. normal body size compared to the control), and 3 is dead.
Buffer and GUS controls apply to targets appearing within the same section, with sections separated by blank lines.

### Example 4: Agrobacterium-Mediated Transformation of Maize

[0246] For Agrobacterium-mediated transformation of maize with a silencing element of the invention, the method of Zhao is employed (U.S. Pat. No. 5,981,840, and PCT patent publication WO98/32326; the contents of which are hereby incorporated by reference). Such a construct can, for example, express a long double stranded RNA of the target sequence set forth in Table 1. Such a construct can be linked to a promoter. Briefly, immature embryos are isolated from maize and the embryos contacted with a suspension of Agrobacterium, where the bacteria are capable of transferring the polynucleotide comprising the silencing element to at least one cell of at least one of the immature embryos (step 1: the infection step). In this step the immature embryos are immersed in an Agrobacterium suspension for the initiation of inoculation. The embryos are co-cultured for a time with the Agrobacterium (step 2: the co-cultivation step). The immature embryos are cultured on solid medium following the infection step. Following this co-cultivation period an optional “resting” step is contemplated. In this resting step, the embryos are incubated in the presence of at least one antibiotic known to inhibit the growth of Agrobacterium without the addition of a selective agent for plant transformants (step 3: resting step). The immature embryos are cultured on solid medium with antibiotic, but without a selecting agent, for elimination of Agrobacterium and for a resting phase for the infected cells. Next, inoculated embryos are cultured on medium containing a selective agent and growing transformed callus is recovered (step 4: the selection step). The immature embryos are cultured on solid medium with a selective agent resulting in the selective growth of transformed cells. The callus is then regenerated into plants (step 5: the regeneration step), and calli grown on selective medium are cultured on solid medium to regenerate the plants.

### Example 5: Expression of Silencing Elements in Maize

[0247] Using the assay methods described above and below, fragments with confirmed IC₅₀ values below 2 ppm are advanced to plant transformation vector construction and in planta efficacy evaluation. The silencing elements are expressed in maize plants as hairpins. The TO plants of RNAi constructs are tested for insect control against corn root worms in the greenhouse setting.

[0248] Briefly, maize plants are transformed with plasmids containing at least one polynucleotide disclosed herein and plants expressing the silencing elements are transplanted from 272V plates into greenhouse flats containing potting mix. At Approximately 10 to 14 days after transplant, plants (now at growth stage V2-V3) are transplanted into larger pots containing potting mix. At 14 days post greenhouse send date, plants are infested with 200 eggs of Western corn root worms (WCRW) per plant. For later sets, a second infestation of 200 eggs WCRW/plant is done 14 days after the first infestation and scoring is at 14 days after the second infestation. 21 days post infestation, plants are scored using CRWNIS. Those plants with a score of ≤1.0 are transplanted into large pots for Ti seed. Plants are monitored for adult beetle emergence, and those emerged beetles are assessed for reproductive parameters as described in Example 8.

[0249] T0 transgenic plants are expected to show a significant reduction in the insect damage score (CRWNIS), reduced adult beetle emergence, reduced adult fecundity, and/or control of offspring, compared to transgenic negative line HC69.

### Example 8: Western Corn Rootworm (WCRW) Adult Assay by Target dsRNA

[0250] Artificial diet for WCRW adults is prepared using a modified protocol (Rangasamy M et al. (2012). Pest Manag. Sci. 68(4):587-91; and Nowatzki T M, et al. (2006) J Econ. Entomol. 99(3):927-30). The modified diet is designed for use in the diet incorporated bioassay described herein below (25 μl test sample:75 μl prepared diet) and is produced using standard 96-well micro-titer plates. WCRW adults consume significant proportions of the diet within 24 hours, and control mortality remains <15% during the 2-3 week study period. For all the bioassays described herein, WCRW life stages (adults and larvae) are kept under standard conditions, for example, Jackson, J. J. (1986), pp 25-48. In Krysan J. L. and Miller T. A. (eds): Methods for the Study of pest Diabrotica. Springer-Verlag, New York. 260 pp, and Branson, T. F., et al. (1988), J. Econ. Entomal. 81(1): 410-414 (1988). Beetles from the same batch are categorized in to two groups. The first test group consists of male and females of <10 days old (range 2-5 days old) (hereinafter referred to as “younger females”). The younger females are in their preoviposition period (the period before oviposition of the first eggs). The second group consists of >11 days old and mated females (hereinafter referred to as “older females”) and they are in oviposition period (females are ready to lay eggs). For the younger female group 100 beetles (50 females and 50 males) and for the older female group 50 mated females are arranged for each treatment. The following three treatments are compared 1) sterile DI water (control); 2) GUS dsRNA (negative control, GenBank Accession #S69414.1; SEQ ID NO: 399 herein); and 3) Target dsRNA (SEQ ID NOS: 1-398). The bioassay is carried out using a diet incorporation methodology. Test samples of GFP dsRNA and target dsRNA are prepared separately and 25 μl of the respective samples are incorporated into 75 μl of modified WCRW adult artificial diet per well in 96-well micro-titer plates for a final concentration of 100 ppm. For control 25 μl of sterile DI water is incorporated into 75 μl of modified WCRW adult artificial diet per well. The effects on individual WCRW adult beetle are confined using individual wells of 32 cell trays (C-D International, Pitman, N.J.) provided with single diet pill (mixture of 25 μl test sample and 75 μl of modified WCRW adult artificial diet) for 24 hours. After 24 hours, treated adults are collected, counted and transferred to their respective holding cages and provided standard SCRW dry adult diet and water source until the end of the study period (22-25 days).

[0251] WCRW eggs are collected daily for 13-14 days starting from 24 hour or 7 days after exposure for the older and younger female group, respectively. Eggs are collected using oviposition dish. Collected eggs are incubated in a heat and humidity controlled growth chamber (25° C., 65%±5% relative humidity (RH)) with controlled light/dark cycles (16 hr light:8 hr darkness) for 12-14 days before processing.

[0252] Several small aliquots of egg-agar suspensions are dispensed onto a hatch plate (petri-dish containing 2% water agar and two layers of filter paper) for counting and/or hatch test depending on the number of eggs obtained for a given day. For the egg hatch test, samples (1-6) each containing 25 μl of egg-agar suspension are dispensed onto the hatch plate as described above and the lids secured with micropore tape to avoid larval escape. Total number of eggs in each 25 μl sample are counted prior to incubation. Egg hatch plates are then incubated in a heat and humidity controlled growth chamber (25° C., 65%±5% RH) with controlled light/dark cycles (16 hr light:8 hr darkness) for three days. Egg hatch is counted over three days period by counting the number of eggs showing larval emergence hole. For each treatment, four treated female and male beetles (younger female group) and four females (older female group) are sampled for gene suppression at 4 and 8 days after exposure for the older and younger female group respectively.

[0253] Data obtained using these methods show the total number of eggs produced within 13-14 days by treatment and age group. Results are expected to show that ingestion of the target dsRNA significantly reduce the total number of eggs produced during the test period, increased mortality, reduced fecundity, or control of offspring.

### Example 9: WCRW Adult Exposed Bioassay and Gene Suppression by Treatment of dsRNA

[0254] Virgin adult beetles are obtained by rearing 3^{rd} instar larvae individually in a 50 mL falcon tube containing the pupation medium. Beetles are sexed upon emergence; starved for 24 hours and exposed at 100 ppm of dsRNA targeting any one of SEQ ID NOS: 1-398 or controls (sterile water or GUS dsRNA) using diet incorporated method for one day. Treated beetles are provided untreated diet and kept in solitary confinement for an additional 5 days. At least 12 treated beetles of mixed sex are collected in liquid nitrogen for gene suppression analysis. At least 14 pairs (male and female) are arranged for each treatment for subsequent mating and fecundity assessment. Due to delay in mating, oviposition may be up to 19 days after emergence and egg production is assessed for 10 days. High dose adult exposure to dsRNA is expected to show increased mortality, reduced fecundity, or control of offspring. Relative expression by RT-qPCR assay is performed as in Example 2.

### Example 10: WCRW Sterile Gene Screening by 3^{rd} Instar Sterilization Bioassay at 50 ppm

[0255] The effect of treatment of larvae on WCRW sterilization by dsRNA targeting various genes of interest (GOI) was assessed using 3^{rd} instar. The study was carried out using 10 day old 3^{rd} instar larvae that were harvested from corn mats and acclimatized on standard WCRW larval diet for 24 hours. Diet incorporation method was used for exposing larvae to 50 ppm final concentration of the respective test dsRNA samples in 2 mL per well of 6-well plate. Three to four 6-well plates were prepared for each sample and 300-400 larvae were exposed to water or 50 ppm of target dsRNA fragment (GOI) for 1 day (˜104 larvae/plate; 16-18 larvae/well). After exposure, 3′ instar larvae were placed in pupation medium for 15 days. Emerged adults were collected, counted, transferred to their respective holding cages, and provided standard SCRW dry adult diet with a water source (water agar) until the end of the study period (˜26 days). Beetle holding cages were kept at room temperature (usually from 22-25° C.); 16:8 dark and light condition, and 50%±5% relative humidity. After 10 days of preoviposition period, for each treatment the number of male and female pairs was adjusted to a target of 16-20 pairs depending on beetle density. Each cage received oviposition dishes and eggs were collected over a period of 15 days, and processed following the method described in Example 7.

[0256] Table 4 shows beetle count, proportion emerged, and relative emergence for select active WCRW gene targets. Table 5 shows egg production, egg hatch, reduction in egg production, and fecundity for select active WCRW gene targets.

[0257] A set of 24 males and 24 females per treatment were sampled 10 days after emergence (during the preoviposition period) for gene suppression analysis. Gene expression analysis is shown in FIG. 3 for WCRW adults exposed to dsRNA targeting DCR-1 as late third instar larvae. Larvae were allowed to pupate, and emerged adults were collected during the pre-oviposition period (i.e. 10 days post-emergence). Three samples per treatment and sex were collected, each containing eight insects, and expression levels of the DCR-1 transcript were assessed. Values for the male and female samples of the same treatment type were combined for the final calculations. The graph shows median normalized expression value for each treatment, with error bars representing the median absolute deviation.

[0258] A set of 24 pupae per treatment were sampled 12 days after placement into pupation medium for gene suppression analysis. Gene expression analysis is shown in FIG. 4 for WCRW exposed to dsRNA targeting Drosha, DCR-2, Pasha, or R2D2 as late third instar larvae. A set of 24 third instar larvae per treatment were sampled 48-hours after initial exposure to the treatment diet for gene suppression analysis. Gene expression analysis is shown in FIG. 5 for WCRW exposed to dsRNA targeting AGO1 as late third instar larvae. Three samples per treatment were collected, each containing eight insects, and expression levels of each target transcript were assessed. The graphs show median normalized expression value for each treatment, with error bars representing the median absolute deviation.

TABLE 4
WCRW reduced emergence gene screening by 3rd
instar sterilization bioassay at 50 ppm

| | Total No. | Total No. | | Relative | | |
|---|---|---|---|---|---|---|
| Target | Larvae to | Adults | Proportion | emergence | | SEQ |
| Gene | Pupation | Emerged | Emerged | (%) | (± SEM) | ID NO: |
| DCR-1* | 315 | 292 | 0.93 | 3.9 | 3.1 | 5 |
| H2O* | 305 | 272 | 0.89 | 0.0 | 2.8 | |
| Drosha | 456 | 106 | 0.23 | −30.3 | 8.1 | 6 |
| DCR-2 | 456 | 120 | 0.26 | −21.1 | 7.8 | 18 |
| Pasha | 456 | 68 | 0.15 | −55.3 | 3.9 | 14 |
| R2D2 | 455 | 207 | 0.45 | 36.5 | 16.2 | 20 |
| AGO1 | 455 | 21 | 0.05 | −86.2 | 1.7 | 1 |
| GUS | 455 | 202 | 0.44 | 32.9 | 19.8 | 399 |
| Buffer | 455 | 181 | 0.40 | 19.3 | 3.6 | |
| H2O | 456 | 152 | 0.33 | 0.0 | 11.7 | |

Column 1 indicates GOI (gene of interest), column 2 and 3 indicate total numbers of larvae introduced into pupation dishes and number of emerged adults collected from each treatment, respectively; column 4 inidcates the proportion hatched within a treatment; columns 5 and 6 indicates average percent emergence relative to water controls (% ± SEM).
*Relative emergence calculated for starred treatment based on starred water control. Non-starred treatments calculated relative to non-starred water control.

TABLE 5
WCRW sterile gene screening by 3rd instar sterilization bioassay at 50 ppm

| | Total No. | Total No. | Ave. Egg | | Reduction in | | Net reduction | | |
|---|---|---|---|---|---|---|---|---|---|
| Target | Eggs/ | Fertile | hatch | | egg production | | in fecundity | | SEQ |
| Gene | female | eggs/female | (%) | (± SEM) | (%) | (± SEM) | (%) | (± SEM) | ID NO: |
| Drosha | 64 | 18 | 28.6 | 8.9 | 43.8 | 11.9 | 57.1 | 15.9 | 6 |
| DCR-1 | 58 | 24 | 40.8 | 2.1 | 48.8 | 1.2 | 42.4 | 3.3 | 5 |
| DCR-2 | 89 | 24 | 27.2 | 2.7 | 21.8 | 10.3 | 42.7 | 3.6 | 18 |
| Pasha | 68 | 22 | 32.1 | 6.9 | 40.7 | 6.3 | 46.1 | 16.5 | 14 |
| R2D2 | 85 | 26 | 30.2 | 1.7 | 25.2 | 3.6 | 37.5 | 6.4 | 20 |
| AGO1* | 46 | 30 | 65.7 | | 32.2 | | 27.2 | | 1 |
| GUS | 111 | 40 | 35.6 | 2.5 | 2.3 | 4.7 | 3.6 | 11.0 | 399 |
| Buffer | 129 | 40 | 31.1 | 1.9 | 13.2 | 3.9 | 2.6 | 8.7 | |
| H2O* | 114 | 41 | 35.1 | 4.1 | | | | | |

Column 1 indicates GOI (gene of interest), column 2 and 3 indicate total egg production/female and total viable eggs/female respectively during the 15 days egg production period; columns 4 and 5 indicate cumulative average egg hatch (± SEM); columns 6 and 7 indicates average reduction in egg production (% ± SEM); columns 8 and 9 indicate average net reduction in fecundity (% ± SEM).
Values for the water control are cumulative average of 2 independant experiments, each run for the duration of 15 days of egg production.
*Note that SEM values could not be calculated for AGO1, as too few adults emerged to provide cage replications.

The application's sequence listing, which the Patent Office published only in electronic form, follows.

SEQUENCE LISTING (399 sequences)

SEQ ID NO: 1 - DNA, 3443 bp, Diabrotica virgifera virgifera
gccctactaaaacaccacgcaggcgcagcatttatctcgcgaatccagacacacgatacacgattgttatccaaataagacaagtgcgacattcgtcaaaaatttcgtgttttgaaaacattgttgaactgacatgtgtagagttttctgtgaaagttttgtctcgtctcaatttagtgcaaccattgttttcgtgtgtcagattcgtaaaagtccgcgtggttcaaagacgtagttagtgtttttgtatacaatgctgttttcccggtagttagtaaccttgaattattataagaattgttaccctaggacaagcacccaaactttgttgttaccaccgaaaacgtacctaaaccatgtcagcggagactgagctgacgttgcagactggactctcgccagtcttgttaccagatatgactgctctcagtcttatcggtcatcgtactcagacaactcacatagcagcccatccacctgctcctcaacataccagtatgcaacagaacaattcaaacacgggtgcatccggaacctcgttgggccccaccagtaccgctatcgcacttcccaccgcagctggtgccatagcggcagtctctccaccagtggaaccgccggtcttccaatgcccgaggagaccgaacctcggacgcgaaggccgacccatcggtctcaaagcgaaccatttccagatcaccatgcccaggggtttcgtacatcactatgacgtcaacatccagccggataagtgccctcgaaaggttaacagagaaatcatcgagacaatggtgaaggcatacggcaaaatattcggcaacctaaaaccagtattcgatggcagaaacaacctctacaccagagatccccttcccatcggcaattcccgtgaagaactcgaagtcactctcccgggcgaaggcaaggacagactgttccgagtcagcatcaaatgggtagctcaagtctccttgtacggtctcgaagaagctctcgaaggcagaactagacagattccgttcgaagctatcttggctttggacgtggtcatgaggcatttgccttcgatgagctacacgcccgtaggaagaagttttttcagcagtcctgagggatattatcatcctttaggcggtggtagagaagtctggtttggatttcatcaatctgtaagacctagtcaatggaaaatgatgctcaatattgatgtgtctgcaacggcattttacaaagcgcaacctgtgatagagtttatgtgcgaagtcctggacattcgagacataaacgaacagaggaaacctctaacagacagccaacgtgttaagttcacaaaggaaatcaagggtctcaaaatagaaataacgcattgtggagcgatgaggagaaagtacagagtctgtaatgtgacgaggagaccagcacagatgcaatcatttccacttcaattagaaaacggccaaactgtcgagtgtacagtggcgaaatatttcttggacaagtacaagatgaaattaagatacccccatttgccatgcctccaggttggccaagaacacaagcacacatacctaccattagaagtttgcaacattgttgcgggacaaaggtgtatcaagaagttaacggacatgcagacttcgacgatgatcaaagcaacagcgagatcggcgccggacagagaacgcgaaatcaacaacttggtccgtcgagccgacttcaacaacgacgagtacgtacaagaattcggtctgaccatcagcaacaacatgatggaggtcagagggagggtcctgcccccgccgaaattacaatacggcggtagggtggcctccctcagtggacaggtgggctggcacagtaaacaacaagcgatgccaaatcaaggtgtttgggatatgcgaggtaaacagttcttcaccggtgttgaaatcagagtttgggccattgcttgttttgcaccacaacgtaccgtcagagaagacgctctaaggaactttactcaacaactccagaaaatctcaaacgatgccggcatgccaattataggtcaaccatgcttttgcaaatatgcaaccggtccagatcaagtcgaacccatgttccgttatttgaagtccaccttccagtctttgcagcttgttgtcgtagttctaccaggaaaaacaccagtatatgccgaagtaaaaagagttggcgatactgtgttaggaatggccacccaatgtgttcaagcgaaaaatgtcaataagacttctcctcaaacactgtccaatttatgcctaaaaattaatgttaagttgggaggaatcaacagcatattagtgccatcaattagaccaaagatatttaatgaacccgtaattttccttggcgctgacgtgacccatccccctgccggcgataacaagaaaccttcgattgccgcggtggtaggttccatggacgcccatccatcgaggtatgctgctacagttcgtgtccaacaacacagacaagaaatcatacaagaattaagctctatggtcagagaattactcattatgttttataagtcaacaggtggttacaaacctcatcgaattatcttatatagggatggagtttccgaaggacaatttttacagttgctgcagcatgaacttactgctatcagagaggcttgtattaaattggaagctgactacaagccaggtatcacatttatcgtggtccagaagaggcatcacacaaggctcttctgttcggataagaaggaacaaagtggcaaaagcggaaacattccagccggaactactgttgatgtcggcatcactcatccgacagaatttgatttctatctctgtagccatcaaggaatccagggtacttcaagaccatcacactaccacgtcttgtgggacgattcacatttagactcggacgaactgcagtgtttgacatatcagttatgtcatacttatgttaggtgtaccaggtccgtttcgatacctgcgccagcctattatgctcacttggtggcctttagggctcgttatcacttggtagaaaaagagcatgacagcggtgaaggttcccaccaatcgggatcctcggaagacagaactcctggagcgatggccagggcgataactgtccacgccgataccaaaaaagtaatgtactttgcatagaagaggcccagatggcaaatgtacggatagaaacgttgagacaaccgtaaaaacatagcgaccaaatcgatatggtgcagatatcgacatgaggtacaaatgtagcatatttgttttgctttgtttaagatttccaagttgtttacgactgtttaagcgtctcgtgttgtttaagcgacccggatccgaaacggatccaaggcggatccaacgcggatccgaaagtgattcgacacggatccgaaacggatggatccgaaacggattcgagtc

SEQ ID NO: 2 - DNA, 2852 bp, Diabrotica virgifera virgifera
  misc_feature (2368)..(2389): n is a, c, g, or t
agaaaaacgcgttcttcggttacgtcactaggccattttgtatttggtgaaatctttgttcctgaacagagaaaagttgtaaggtttttcgtaaacctcgtgttctttttagagtgttactaaaaaattatcaaaattccggtgcccacgagaaacagggatcccggccactacggtagcggtgatatgaacaacaagaggaaaaatcgagggggccctgtcaggacccagagaccttcaaggtcagtggtatccgatggagtatacaacaatgctcattttatgcatgcttctactggacaaattggtaatgtagttcgaattactacagcttctggagtcgtatgggaaggtgtatttaagacattctcaagtagatttgacgtagtattagaggtggcagccaaagtagaaaacccagatagtcccaattcccagatcaatgttgatacctacgtggacaagctcatatttaaggcgtgtgatattttgacaatggtagcccaggatgtagatctagaatacccaattagagatactttccaaacggatactgccatttccgctagacttaacggtagtactaagttagaagagcgagagctggaaccatgggattcttcagggatgaatggtacagacatacagctagaacttgaccaagccaacggctgggacgctaatgacatgtttagaaaaaacgaacaagattatggagttcagagtaccttcgaccagtctttaagaggatacacggtacctctccaaacaagcgacagcgccgattacaaagaagcagaagcgaaagctaacatgatagcgaatgaaattgaaaatcagcctcagcataaagctaggttagaattagaaaacggcgatgaagaggcagcttttgccagtgttgtcaggccaaaccaggattctagtaccaatggtaaatatattcctccagctaaacgaaagaatcagaacaatggaaaattagtaagaagtactccgcccccaagccagagtaacagcaatcagaatactccatcaccaaaagaaactagaccacccatgacttatcccactctaccatccccgcatcaaacgaatgtacatgtgcaacaagtgctccctcaacatcagccaccaccccatatgcacaacgctactgtacattcgccgcctatgagcatgcagccacatgtaataccacctccaaaccatccgcgtcctcattctcatacaccaccccatcaataccaacctcctgtgcaatctagaccgccgccacctcaaaccattcctcagcagccgcctcatcaacctaaggctcaaatgaacggtgaagccaaagtgccgccacgtcaacagagggtataccaaagccagcaatatccgcctccagaaatgaaaccggatataccagctccacaccaacctagacacagagaagatacaatgaaggacttgcatcaattttcgcaagactttaaattggcaccaatgccaactgaacaacctccaccgcaaatgcaaccgcctccgccagtggttgaacaagtggttcaaccagttcaacaaattcttcccaataaacccccacagcagccatcaccaccacaacctcagcagtccattagtccacaacaggaaaacttggacaaagttacaaatacattaaagaagtctacattgaatccaaacgcaaaggaattcgttttgaatccttctgctaaaccatttcaaccaaggtctccaagtactccatcagctagcaggcctcatactccacagactccaagccatagcccgtatatcccagccacagttggcgggcccgctgtgcagccacctatgcaggttatgatgccattgcactacgtaatgaccagccagccgcagtatcaaccgccaccacaaggcaataagattagacgtttaccaatgaggacggacatggcgtcacagatgcaagtagccgcagccactgggcagccgctcctagctccggcccccattcaacccttcatttatccaccggcaatgaaccaggcttatcaaccgatgcatatggttagaacttacgaaacgtctccccaaatccagtatattcctcccaatccgcatccctcgcaaactccttcacctgcgcaaccgcctcagtataatcctgcacagggacctcaggcgccacctcagcagtgccaggcagcacctcctccaccacagagtcatcaccagtttcctctaatgtaccatccgattattcccgcgcagccgcacatgatgcagagtatgcagtatttgccgcaagctccgccccctcctcaacccccgatgcaggttttgatgcaccaacatcccggccaagggaaccccnnnnnnnnnnnnnnnnnnnnnnaatatgtcgcgtcacgtattggaggttttcttggttgagtcagctaagaattctaaagaatactttttatttaaaatttggagagaacaaattgtttgatgataaggttatttatcgacaattattttttggttactgtgtaactacagggaagcttgaaaacatattataataaaagaaaccttttcaagtataatctgaacattacaattttctaattcaacaaggaatggatatggaagtgaagggaggtgagtgtaaaaagagaattatataagatgccgaaagtgaaaagagatctgtagaaatgggttatatatttttaaaaaaatatactacatttatagatatttaaagcatctagacataagcaacgaaagaaaaggagaagaaaaatttctgtaatcaatattattattcccttttgtagtgaatatgataattctgttatagtgcatgagtg

SEQ ID NO: 3 - DNA, 1640 bp, Diabrotica virgifera virgifera
cttgtcaaatgtcaagttcagtgtgtactttatttaaaaacatggctgattccgtcgagttgcgtatgagtgtaacgtctatcaagagagtagatccatatgtaaaagatattcttgcaagtgctacacacgtcgctttatataattttaacacttccattaacgagtgggaaaaaactgaaaccgaaggtgcactgtttgtatacagccgaaatggagaaccatttcacagtattatggttatgaataggttaaacactgacaatttgattgagccaattgtaaaagattttgagtatcagatgcaagcaccgtttttactgtataggaattcaaaaagtaaaatattcggaatttggttttttaacagagaggagtgtattcgtattaccgttttagtagaatctatcatgaaaggtctaaaagacactggtgatgagaaatcgaaaaagaaaggaaacaatgttgatatatttagtatgttaagtaaagctcaagaagattttaatagaaccccaaccaaacaagatgcagttccaacattttcttcgactcctagggttcctgatgttacatctcaaagtgttatggacttttttgcaaaagctagtacaaatacaggccaaaaaccggttaatacagaagaacatgtattgcagagattaatgtccaatcctgcacattctgttgaacatatagaaaaacaacagaggtctataacacctcaagatagtttaattgggcagcaaaaagtgatatctagtggtgatcgaagaagtgtacctatctcatttccaagttctgaaaataaaattggttcagaaaatggattccaattacacaattccctcaaaagccaatctttgatacaaagcacatcgccacttgcttttttattgcaacaaaataatttagggcagacagaaaaagaagaatctcatgatttgttgagttcctccccatttagtcagtttatagattcacagaaaccccatctgatgactcccatgatgttcacaaccccaaaaccaaaagaaaatttggacagctccacaactgacgcagaccagattgacttactcacggagaaacaattagcccaagcccttatttaccttttaaaaaacaacgccgatttcactaaacaaattcacgaagcttatgtaaagtcaataatggagaaagttaatcttagtacaagtaaatcttttatataaagtattagtttaattgggaagatcttacttgaagaaaatgattcaacattgacaacggaacaggcttttttaatttgtacgtacttattgacaactgaaatctggaattttattgtacctaattgattttgtgattatatcaatttacaagctttttgtattacttagacccagcgcatacatacaactttttagtggaacaactatttagtcgaattgtgagggtattacgattcgttctcgactaaactatttagttgtgtagggtgcgcctacagtcgatagttgaattggaaatttcagtgtgtcaacacgtcgaaagttaattgaaaaatctctttgaatttagaagtagacggagaggcagcgccgggaatagtccaagaggcagcatttgaggatttctctgaatttgctaaagct

SEQ ID NO: 4 - DNA, 1224 bp, Diabrotica virgifera virgifera
  misc_feature (1192)..(1199): n is a, c, g, or t
  misc_feature (1203)..(1221): n is a, c, g, or t
agttctcatcataacacaacaaaatgtataacgtttataaagaaagagaaacgcaaaagccttttttcatgtatttcacgtaatattttgtgtttattttgatatattgtgaatgattttaacattgtgatactaaaataatgggtgaaacagaaaacgtcgaaactagaaccgtaaaacattcaattccaattgatattctcaatgacctcttaacgaggtttataatatgtgtgccagaatctgccaaacagaatttaataaggatttgttttcaaatcgaattggctcattggttctatttggacttctacgttggaaatgatagccggttgaaggcttgtagcatttatgaatttgccgcccatgtatttcagcacatccctcacctcaaaccagagagccataaactcaatgagattatggaaaaatggaaggagtacaaacaaagtgtacctacctatggggccataatgctttctgaaaatttatctcatgttcttctcgtccaaagctactgggcgaaatcttcctggagtttcccgaaaggtaaagtaaatgaagaagaagatcctgctcattgcgctgtcagggaggtgctggaggaaaccggttttgatattagcaagtatatagatcctgatgattacatccagtctacaattaatgatcagttggtcaggttatatatagtcaagaacatccctatggcaacgaaattcagtccaaaaacaagatgcgagataaaagcatgctcgtggtttcctgtcacagacttaccgatgagcaaaaaggatgccacacctaagaccaaaatgggagtgaatgctaacgcctttttcatggtgttacctttcgtgaaaagactgaagcaaatttgtaacggaagtacaattcaaccgaggcatcggcacaaatcagccagtttttgtgagagcgatgtggtacatccgaggcataggaccaaatcaatgcataaggcagacaccgacgatgtaaggcatatcaaaaaacgtcaagagaaaaaacaacagcaccatttgaaaagacagttgttcaccgatgacgacaatttcgaaactcagttctgtgctccctcgtggctcaattttaaatttgacaaaattgccatcatggaatgcatgccataaccggttcatttaattatcattatcattgtttaaaaaagaannnnnnnnacgnnnnnnnnnnnnnnnnnnngtt

SEQ ID NO: 5 - DNA, 6472 bp, Diabrotica virgifera virgifera
acaagtccattgtgttctcacaacagataaaataaataatatttagaataattttaatatattttaaattgtataaatgaaataaggttcaaaagaaatctcggattttcataatgtgttgtgttaaatgataatagatattaaccaaactttttccactccaaagagatatttatcaaaatggcaagttatcataatgaaaatgtatacacacatacattcactcctaaagaatatcaagttgaattattggaatctgcgaaaatcaaaaacaccataatgtgctccagcacaagttgcgccaaagcttttattcttgttaagttattacaagaattttcctggcaaatgcgaattaagaatggtaaaaaagctctgtttatcttagatccacagaatgttccgattatgacctcgcatataaagtatctaacagatttaaattgtattagcatcatggaatatactcttgatgccaaggaaaatggaattctggactattttgaaccttatcaagtgattacctctactgcagaaatatgtgtggaaatgctcaagcaaagtattatttcagatttttcagcattcaatttatttgttattgatgattgtttatatggtccaagacagtcacttatagagataattatgaaatattacagaagctcaccagtttttaatcgacctagaatacttggtttaacaacaggtctattaagttcagaattacagccagatagactagaaggggaactaagaagactagaaaaattactaaattctgatgtggacacttcatcggaaatagtaacattgattagattatgttgtagaccacatgaaactttaatagaatgtcctaaaaatgaacctgacagtttgtatgatgaaataaaaaatattattaagatggcaatagaatttcttaaagatcacaggtatgatccaagtgaaatatatgaagatgatttattggaagaattaaaacaagttccagatcctcgaactgttcctttagagttactagaggagtttttagaaattctcaaagacctaggaccatggggtgcagataaagctgctcttaacattttgtcaaaaattgagaaacttaaagtaaaaataccatatgaaaggcattatttattactctgtatggtatcatcagctttagtaactgtgagagcagtatgtgattatgtgtttgaaagctatgatgagcttgaaagaataaacaagttttcttctccaaaagttctcaagtttattgatgttttaaaacaatttaagcctcctggagaaaagccacaaccttctcaattaataaaagacaaagaggaaacttcaccagttaaaataaaatgtagggggaagggaccaagaaggcctttatttcccagacctcaaaatgaagataacttatgctgcttggtctttgttcacaatcgctataaagccaaatcactatttgccttgctctgttctctgtcaaatgtacatgatgacttatggtggatatcagcattgttttcagttgaaaaagtagcagatagtagaagtgaagcaagacaggctgaaaatgagcacaaaacccaggaagaagtactgcgaaagttcaggtgccatgaatgcaatattctcgtttccacatctgtactagaacaaggctgtgatttaccaaagtgcaacttagttattagatttgatttgccaaacacattttatagttacattcaaagtaaagcaagagctagagctcctgaggctcattatattctttttgggaatgaacaggagcttgataaatttgtagacaatttagctgaatataatgaagtagaaaatacattacttagaagatgttatagtctagagcccaataaaaatgaagaaatggttgctgatatgtacaataatctatgcaaaccataccaacccttatcagaggaaggtgcacccagtattactttaatcaatgcgatctctttacttaataaatattgtgccaagctacctagtgacacttttaccagactaactcctatatggtcagaggacaaaactaatgatggtaaatttatttgtcatcttcgacttccaattaactctccagttaagaaaaccatcagcagtccaccaatgacgaatggtttattggcgaggagggctgcagcgtttatgatctgccagcttctacacatgaccaaagaattagatgattaccttcaaccaattagcaaggaaaattttcgggctacagaagatgattgggtgaattttgctctggatgaatctgatgatgaaacctctgaagttcggccaggtaccaccaaacgtagacaatattattataaacggatatcagaagccctcttaaattgccatccagttgctgggcaaccaacgttcttttataaaataatgatgacattaacatgccctttacctgaggaacaaaatacaagaggcaggaagatttatcccccagaagactcccttcaaggttttggaattctaacttctaaaaggataccaaagataagtgccttcccaatatttactcgatcaggagaagttagtgtagatttggagcttatatctacagatgtcgttcttagtgagagccagatcgagaaaacgagagaatttgtaaactatacctttactagcgttttgaggctccagaaatatttaatgttattcaatccggaagcttcacctaataactatcttattgttccaactattaaagatgatgctcaaagtgttagagtccactgggatttcatagatttgatattcaataatttaacaactactccggagtttattgtcgacgaaaaaagagtagactacgaatttaaagctgaggcatatagtgatgctgtcgtgatgccctggtataggaatcaagatcagcctcagtatttttatgttgctgaaatttgtagcaacctgaaccctacgtcagcatttcctggctcagagtacgctacatttgaggagtattataaccgaaaatatggtatacagattcaaaatttgaaccagaatctactagatgtcgatcatacttcagccagattaaattttcttacccctagatatgtgaacagaaaaggagttgctctgccaacaagcagtgaagaaaccaaacgcgccaagcgcgaaaacttggaacaaaagcaaatactagtgcccgaactatgtgccattcatccatttccaggttctctatggagaaaagctgtagcgttaccttgcattctttacagaatcaacgcgttgctcctggccgatcagatacgcagaacagttgctgaggctctcagattaggaaaatcgaatttgtctgaagattttaaatggccttccttaaatttcggttggagcctctccgatgtcctcaagaaatccagggaggaagagctacggaaaaaacaagagaacttagcagctttggaaacaaaagtaacagaaaaattgcaaacattaacgattcgggaaataaaatcggatgaagaccctgagagtatagatgattgcagtaatgatgacaccaaattagaaacttatataagtgactctaataatgaaggcgaatctaaatggatcgaaataggtacatggtgtaatgaaatggccggatctacagacccagaaaattcggccgtagttcgatacgcttcaccaacaagttggatggcagtagatacaaactacgaagatttttctgatagtgaatcagatatgtatgatgaagattcggatacagaacttggaccttttagaatcgagtttacaggtgatcatcaggcagaagctgtagacgatgaagaagatgaagaagatagttccttcaaactttacaacgatgatagtgtgtggcaaatagatgaagaaaacgagctgactgagaatcttaagaaagaatttcatgcagcctgtgacaaaaataaaaagcatatactttcaagtggcatattaattaaaagagacagtacttttagtaaacactcttctagggataaggaaggagttacagtgtttttaaatcccatagttaataatattgatttatcaggactatatatgacccccatcgagcaacaaatggatgatatattagaattagaatattttaacgagtatgataaatctgaacctctgtcatttagttttgataaacaaccaaacctagaggaacatcctggtccaagtcctaacgtgttattacaagctttgacaatgtcaaatgccaacgatggtattaatttagagaggttagaaacaattggtgattcttttttaaaatatgctataacgaattacttatattctaaatacgagaacgttcatgaaggaaagttgagtcatttgaggtctaaacaagttagcaatttgaatttatatcgtttaggaaggcgaaaatatttaggagagtttatgatagctacaaaatttgatcctcacgataattggttgccaccgtgcttttatgttccgaaacaactggaggaggcgttaatagacgcacaatacccggcgaactgctggtcagttgcagacatggctgctactagaaacatgagtttagacgatatttgtttaatggtacgagaacgcgcagagggttatacattaacaagtaatttgttgagtgatggtcctatggcaattccatataatctagttacacagcatagtatccctgataaaagcattgcagattgtgtagaagcagttataggcgcttatttaatagagtgtggaccgcggggagcacttctatttatggcttggttgggaataagggtattgccaaggctaccagatgatggttatggagaaattaaaccacctagatcaccacttttacgacatgtgcacgatccggagggagaattaaccagactgttagatggatacgataaatttgaaagacacattggttacaagtttgcagaccgttcatatttattgcaagccatgacccatgcgtcgtatttccctaaccaccttacagattgttaccagaggctagaattcctgggcgacgctgtactcgattatttaataacaagacatctatacgaggatcctaggatgcattctcctggtgctttgacggatttgagatcagctctagttaataatacaatttttgcatctttagctgtgagaaataactttcataaatattttagacatctgtcaccaggcttgaacgaagttgtggagagatttataagactacaagaagagagtggacattctttagtagaagaattgtacctggttgtagagaccgaatgtgaggaaatagaagatgtagaagttcccaaagccttaggagatgtctttgaatccgtagcaggtgcaatatttttagattctggaatgtcattagatgctgtgtggaaagtgtactataaaatgatgaaaccggagatcgaacagtttagcaataaagtacccaaatcacccattagagaactcttggaactcgaaccagaaacagcaaaattcggcaaaccagaaaaattggctgatggaaggagagttagagttactgtggaagtatttgggaaaggtttgtttaaagggattggacgcaattaccgtattgccaagtgtaccgcagctaaatgtgcattaaaacatctgaaaagaaggggtttgttaaggaaagtagaaaactaatgtatcacttggcgttttttgtttcctactgtctttttaaatatgaattgtctacgagcaataccgatagacaaagactgaaattgagaaaaaatgaacatggaatgtaagaacattttcggaatcagaaaaaatgtcggaactggcgaaatcaaacaacgtaagacgcaaggtggaatgtagaatacagaagtattgtacagtatataggaataaaaaacaagaaaaatgaggctctgtgccaagaagtacttttgtggaatatagcaaacttctgctacttcaactggtagctcccacagttggatgagataagtcttccctagtttgaggatatattatataataatggacacaattatatattatatattcttaagttacaatatacaacaacatatctcttgatttttctcgaattgtgggtttttccattatctagtgcgctagaccatgatcggaaatttatgttactattggaatatcgttcctttggaaaatatggaaaatattggaatctgcttatcatctctggcatttattcgagaatcacaatgaagtactgcactttcctcctaaaaactgttaattatttttattagtggcccacgaccagaaatgccgtggattaccttaattatgaaatgcaagtcagtcctataataatcattgtctaatgattatgtaatacctattgtacaatatgttctaactcctttatacaatatcctcttattggatcaaaataaaaatttaaaaacaaaaaaaa

SEQ ID NO: 6 - DNA, 4296 bp, Diabrotica virgifera virgifera
gttcaaatctttcaaataaagacgatgatgcttctctgagaatacacgcaggaataggaataaaagaagaagattcgaagattgacgttgacgttgacaagaattcgacagtatttacagtcttgtttagttataatttatatttttgagtattttaatgtaataaacagaacatgtaagaagtgaataatgtgattaagtaaaagaacgatggtttttcatcgccatacataaattatgggcgaccaccagtggtactatgacaacttaaactatcctccacctacacaagctcaatacaatccccacattccaccccaatctagccactcttatacgcagtggtctcaatcgcaacagacatctacgaacgtctacagttatcctccagttccttcgtaccctcctcctccaattcctgcatcttatataccatcatcttctggagtcacccaacaacaacacttcgactacagatattcgcacttgcagtcccaatatcaaactacaggcagtgttaacgattatacgaaagatctagaaaactacagatatataaaatcaagagtaactgaaactgagactgaatttattcgaatttctgagaaatccagggaaagaaaatataggtctccatcgcctagtagatatagaagatcccgcagcagagatagggaccgctatggtagaaaacgaagtgtagataaaaagagacgatattcccgagataggagtcgttccagatcaagtaccaggtccagatcacgtggccgatctagatacagccaaagacgtagaagtagaagccgcagttatgaatacaaacgacgacgaagatctagaactagaacgccatctagaggacattcgagatacaggagtccttcaataaaaagatcaaagaagcccacaccctctgaaataccatccgaatccgaaagagaccaactcctttcgaaatggcgcaagaactactgctcaaccaagcaacaactctccgacaaactggaggagctagcttccatgactgtcgaagatattctagaaaacgagaaaaacatctggacgcgttcgacaccagctgaactgtattaccagagagacctggaaaagccgacggtagtgaatgctacgcagaagctcaaacagctgtgtgatgagtttgaggagggcttggtgacgagggcgaggaaggtgaacgcaaagaaaccgaagtatgtgcctcctccaaggaagaatagagctagattatgtaaacacaaaactgaagctcagagcagctccgatagttcggacgcggatataaccgacgaagaagactgtacaatggaagaactacaaagaaagcagcagcatcctgaccgacttcacccggaaatgtggtttaatgagcctggcgaaatgaacgacggtcccttgtgccgctgctctttaaaatccaagaagtccggcatacgtcacggtatctatccaggcgaacagcatttgccaccgtgccagatggactcgaataacgccaacaggttgtttcattaccgcatcacgatatctcccccgacgaacttcttgatcaagactcccaccatcatacatttcgatgagcacgagttcatctttgagggattttccatgttttcgcatcatcctctagaaaaactaccaaattgcaaggttatccgttttaacattgagtacactattttatacatagaagaaagaatacccgagaattttaccgtgcgtgagctggaattgttcaccgaatttctcttccacgaaatcctggaactggtcgacttagacttcaaagccgctggtgacaaagagggttgctcccagttccatttcctgccgagattcgttcgagaacttccagaaaaaggaaaagaaattttgtgcatgagccaagtactgaaatatctgttgaacagctcagtacctctgatgaaagctgacgatttgggtaaaatgatggagatgactcagaacgaatggcagagttacgccgatgaaattaagggtatggtagtgacttatccaggaaaaaaaccttgctctgttagagtggaccagttggaccgaaacgtagacgaacagatcgaagggaattatacatttccagagattgttcactttggaattagacctccacagctcagttatgcgggaaatccggattatcaaaaagcttggagagactatgtcaaatttcgccatctactggccaacatgtcaaaacccacctacgaggataaacgaaagctggaagccaaagagaacaagctgcaagaaatgcgtacgcaagggaagatgaagagagacgtgactgtggctgtatcggctgagggattttacagaacaggaatcatgtgtgatattattcagcatgcgatgttgattccggtactagtttgccatctgcggtttcaccactctctaaacgtcctggaagagaaggttaaatacaaattcaagaaccgtgcccttctccagctagctctaacccatccgtcgtacaaagaaaattttggtaccaatccagatcacgcccggaacagtttgactaattgcgggattcgacaacctgaatatggagatcgacggatacattatatgaacaccagaaagagaggaatcaacactcttatcaatataatgtctcgtttcggcaaacagcaagaaaccgaatcgaacattacccacaacgaacgtctggaattccttggtgacgccgtagttgaattcctgtcgtccatacatctcttctactccttcccagacctcgaagaaggaggactggcgacttaccgggctgctatagttcaaaaccaacatctgtcagtgctagcgaaaatactcaacctggatcaatatatgctctacgctcacggatcagatctttgccatgacttggagctgcgccacgccatggctaattgctttgaagctctcatgggagcgttgtttttggacggaaaaattgaaattgcagatatggtcttctcggcaacatatttccacgacaaacctgaactcttcgaagtatgggccaatcttccgccgcatcctctgcaagagcaagaacccctgggggacagaaagtggatagaaaagttcgacatcctccagaacttagtgaagtttgaagagtccatcaacgtggagtttaagcatattcgtctattagctagagcgtttaccgacagaagtgtaggatatactaatctaacgatgggatcaaaccagaggttggaatttttgggagatacggtgctgcagttgatagcttctgattatttgtataagtacttccctgagcatcatgagggtcacttatccttgctgagaagctctctggtcaacaatagaactcaagctgtggtgtgcgatgatttggatatggccaagtacgccatttacaacaacccgaaagccgaactcaaaactaaagaccgagcagatctgcttgaggcgtttataggagctttatacgtggatcagggcatggagttctgtgaagttttctgtcaagtgaccctattcccgcgacttcaagatttcatcatgaaccaggactggaacgatcccaaatcgaagctacaacaatgttgtcttactttgcgaactatggacggaggggaaccggatatcccagtttataaagtcattgaatgcaaaggtcctacgaacactagagtttacacagtggcagtgtattttcgaggaagaagactcgccagcgccatgggtcacagtatacaacaagcagaaatgaatgctgccaagaatgctctagaaatatcgcacgacctctttcctcaactggaccaccaaaaaagagtcattgccaagagtatgaagaaacagaagaaaggaagaagtgtttcgaagtcacgatctgagcagtcagcacccaaatcaccgaaacggtattcgagaagcaggtttaaaagatcttcatcgatgtctagctccagcgaatgagatatgaacgtaacataagacttgcaagaagcaggaaccaagtttagaagatcttcgttgaagtctagctccagcgattgagatctgaacgtaacagaaactttggtccttgtttcgaaagcatcaaacctgcagaatgattttattgcttggtatgggttttgcctttatccagcacgtttttggtacagctgctgtagttgaactatttgaatattgttcagaagctattttcttgtggcatgttaatacaatttactatttacgttgggaaaaatccacgattttactttgaaataagtttgtttgacg

SEQ ID NO: 7 - DNA, 1600 bp, Diabrotica virgifera virgifera
cttaaacccaccttaatattttgatcttttcctcagaaccacagcaaacctcaaatacgctctccgctcaaggttgttttctcttccaagaaccaaatcaacatggaggacctaactgtggaagtatgcggcgaaaacggagctctttataagggttttgttatagacgttttcgatgatgaggttcttatacacttcgaagatggttggcagccagactcaaaattcccctttagtcaagttaaattacccccaaaaccagatcccaaggtagaatttacagagaatatggaagtagaggtatattctagagctaataaccaagaagcctatggatggtggaaatcaaggataaagatgatgaagggcgacttctatgtccttgagtacatgggttgggaaacaacctacacagaaatagttagtgtggaccgtcttagagctaaaaacagcaatcctccaattgataaaaatatgttccacaaatttgaaatcgaagttcctgaagatgttcgtgaatatgccaagatagacagtgctcataaagagtttcaaaactcaatacatgcaggaatcataacctataatgctgaaaagggagttttgaacgtagtgtctaggtgtgagcaaagcagtaagttggcggcgatgctgcaagacatgcatttcagaagcctctcacaaaaagtgctcttattaaaacgtacagaagaagctgcccgtcaactggagagtaccaaattggcgacaataggagggtattcagatgagttcatcgttagagaagatttaatgggtttggcaatcggagcgcacggtgctaacattcaacaagctcgaaaagtagatggaattaccaatattgaattagaggagaattcttgcacgtttaaaatttatggtgagactgatgaggctgtgaaaaaggcgcgatccatgttagaatatagcgaagaatctctccaagttcccagggcgttggtcggcaaagttataggcaagaatggcaggatcatccaagaaattgtcgacaaaagcggggtggtacgggttaaaattgaaggtgacaatgagccacaaccgaccattccacgtgaagaagggcaggtaccttttgttttcgtaggaactgtagagagtatatctaatgcaaaagtacttctgcagtatcatttagcacacctaaaggaagtagagcagcttagacaagaaaaattagaaatcgatcagcaactgcgcagcatcaccggttcaagcttaggttcaatgcaaagcctctctatgagtcgccgaaacgatcgaggctacaattcagacatggacggcaacagtagatctggcagaggcggttcgatgagagggcgaggcggccgcggaaggggtggcagaggaggaggcggcgatagatacaattctggtagtaattcaatttcagattatgttaacaatgtggataagcgcaaacatatcggcaataccagaggacggggcggtaccggtggcggcagccataccgccaacggtcgaccgccccgaggaggcggcatgaaccgcgacagatcgcacagagttgatggcgagagcgtggggaacgacaggg

SEQ ID NO: 8 - DNA, 3953 bp, Diabrotica virgifera virgifera
gtatctctggctggccagactgatatggagcactattgaagatgcgcgcccctaccccctccgagccgaagtctacatttcctacctaccaagtgcctcaaaagtcagccatgaggggcagcgcacccccagtacaagttgcagggccatcttgggggggtcgagccgatcccccaagtagtacccgttgcgccgatgaaggcgctctgtctgtgatatccggctcaagttgccgttcaatcgacaactctaatattagaatgcaatctgtgaccgaaaattgtcttctgaactctgttaccgtaccaaatatgcaacgtttagaccatggcatggtcacccacaataatagctttaagttagttagtaagtttggtgctttactccccggacgagacattcccaatcaaaagtctgatgacctcgaactactacgcgatgacctcaatgtactgaattcaactaaatacgatactaaaacactctgcgataacaacgatgaaaaagacgaccatgatgcataccaaatgtcgaacattgaaactcatacctgcacaaataatgacaacagctatcaagagctgtacaagcctttgagacttagagggggaggcgaaagttccctcagcactggtacttctggatggggcacgccaccttctcaatctggtaacaacaatgcaaataagagcaatggccagcaaccacctacctcccaatcaaacaacactggttggggtcaacctggaacgaaaactgcaaataacaatgcaatgccacctaatagtcaacctcctacctctactgctaattctcagaacaacaatggaccaagcaacaataccaaacaacaattggaacaactcaacagtatgagagaagccatttttagccaggatggctggggcggacaacatgtcaatcaagatacaaattgggacattcccagtagccccgagcctcccattaaaatggatggttccggaggtccaccaccatggaaaccggctgtgaataatggtaccgaattatgggaagcgaatcttcgaaacggtggacaacctcctccacaacctcaacagaaaaccccttggggtcacacaccctctacgaacataggcggtacctggggcgaagacgacgacgctgacacttctaatgtttggacgggcgtaccatccaatcaacctcaatggggtggtgcaggtggaaatacgaataatggagccatgtggggcggccctaagaaagaaaacgattggggtacaggtgcaagcaataccggtggctggggtgatccacgtgcagctgatccacgtcaaactggtatggaccctcgagaaatccgcccagaactgagagatatgcgggcaggtaatacagaaaccatgagaattatggatcccagagagaccatgaggcaaatgtctaatagtgatatgagaggagatccgcgcggtattactggaagactaaacggagcaggagctgaagcattttggggccaaggtacacctcatgcagcatctcaaccaatacatcaccacaacaaaatgccagtgcctccaggtaatggtacaggcggttgggaagaaccatcaccaccatctcaaagacgtaatatgccaaattatgatgatggaacttctttgtggggtaatcctcaacaaggctctcactggaaagatctgcccacagggggaagtatgggccgtggaggtaatcctgccggaccacctggtatgaatcaagcacgcggtatgaaacaacctgaaggttcgatgtggggtggacacggacgcaatggatcttgggacgaaacaggaccaggtgcagcctgggacgaacctaattcttgggcgaaacagaaaatgccggatcctttatgggacgaatctgaatggggacacaaacaacagagcaaaccccagcttaccaaggaaatggtttggaactccaaacagtttaggatgttggtcgacatgggacataaaaaagaagacgtcgaaaatgctttacgcttacgcgccatgaacgttgaagaggctctagacctcctcagccctatgcgcaataatcgagcaaacgacgggtggaatacccgtcacgacgatcactacgaacatcccccgttctgtcaacggggattttctaccggtccaggtggcgctgtcgtacaaaagttgttgacacaacaacaagggggtggatctcaaggttttggtggttcttcggcgaatgcgggaagaaatatccaaccacagtctcagccttcaacgcaacaactacggatgttggtgcaacaaatacagatggcagttcaggcagggtatctcaatcaccagattcttaatcaacctttggcgccacaaacgttggttcttctaaatcaactgttgcaacagatcaagaatttacagcagctcatatcacaacaatcaataactggtacgcctatcaacggaaaacagaataacgcttatatgcagttttcagtactcatcacaaaaacaaaacaatcaattgccaatttacagaatcaaatcgctgctcaacaagcgacttacgttaagcaacaacaacaccaaagcagcatgggtgcctatgactcatttaaaacgaatcccatgcatgattcgataaacgctttacaaaccaattttggtgacttaggcattaacaaagagcctcaaatgaacccacaacaatcacgactcacccagtggataagtaaagataaggatgatggtggagaattcagtagagcacctggttcatcttccaaacctcctaatacctcgcctaatatgaatcctctcgttctcaatccatcagatggaccatggtctactggtagaacaggagatactggttggcctgattcttcagccaatgataactcgaatgatgtgaaagacgcacagtggtcaaccaccactcaaccttccctgactgatcttgtacctgagtttgaacctggaaagccctggaagggtaatcaaataaaaattgaagatgaccccagtattacacctggttcggtggtgcgtagtcccctgtctatagcaacaatcaaagacaatgaacttttcaacatgaatcccagcaaaagtccccctgccactgatggtatacaatcattaagtctcagttcatccacatggagctttaatccatctggtacctctacatcaagtgcgtttactagtcctcctggaaaattgccaacgtctaaagctttaggagatttgaatccctcgactgccgtgacctctgaactttggggagctccaaaatcatccagaggtcctccccctggtttatctgcaaagggaagtggtgctatatcaaatggttggtccgctgttaacactatgccatggggaccaggaggccaaagaacttccggaaattggggaggttcttcccaatggttattgcttcgaaatttgactgctcagattgacggttctacattacgcacattatgtttacaacatggtccgctcttaagtttccatctatacttacaccaaggctttgcacttgccaaatattcatcccgtgaggaagctatcaaagctcagaccaccctcaacaactgtgtactcggtaacacaacaatactagccgaaaatccaaccgattgggatgcaaacactttgctccaacaagtagcaagtcaacagagcggctcttccggcgcatggcgaggttcaagcaaacaacccactggggcagacacctggagtaccggctggcccaacaattcaagcagcaccagtttgtgggcagctcctcaactcgacaactcagatcccgctcgtggaaccccatctagtctaaattcttttcttcctaacgacctcttaggtggtgagtccatgtaagttaaggatgaaaccaaaataattccatcttagttacaagtgttgatatctctctctgcgcat

SEQ ID NO: 9 - DNA, 4442 bp, Diabrotica virgifera virgifera
aagggagagtggagaagggattgtgattttttgtaaaattccttgaattcctatagaaattattaaatatgagtgaaaaaattgtgatattaagtatttcatttgtattgtgtgatataaacactaactctctatctgtgaacgtaaaagtgcattcgataacagacttgcgtgtttctaaaacattttgatgcctcccgttagcacaagtttcgctggttggtctcctggcgtccatatttgtgtatctctggctggccagactgatatggagcactattgaagatgcgcgcccctaccccctccgagccgaagtctacatttcctacctaccaagtgcctcaaaagtcagccatgaggggcagcgcacccccagtacaagttgcagggccatcttgggggggtcgagccgatcccccaagtagtacccgttgcgccgatgaaggcgctctgtctgtgatatccggctcaagttgccgttcaatcgacaactctaatattagaatgcaatctgtgaccgaaaattgtcttctgaactctgttaccgtaccaaatatgcaacgtttagaccatggcatggtcacccacaataatagctttaagttagttagtaagtttggtgctttactccccggacgagacattcccaatcaaaagtctgatgacctcgaactactacgcgatgacctcaatgtactgaattcaactaaatacgatactaaaacactctgcgataacaacgatgaaaaagacgaccatgatgcataccaaatgtcgaacattgaaactcatacctgcacaaataatgacaacagctatcaagagctgtacaagcctttgagacttagagggggaggcgaaagttccctcagcactggtacttctggatggggcacgccaccttctcaatctggtaacaacaatgcaaataagagcaatggccagcaaccacctacctcccaatcaaacaacactggttggggtcaacctggaacgaaaactgcaaataacaatgcaatgccacctaatagtcaacctcctacctctactgctaattctcagaacaacaatggaccaagcaacaataccaaacaacaattggaacaactcaacagtatgagagaagccatttttagccaggatggctggggcggacaacatgtcaatcaagatacaaattgggacattcccagtagccccgagcctcccattaaaatggatggttccggaggtccaccaccatggaaaccggctgtgaataatggtaccgaattatgggaagcgaatcttcgaaacggtggacaacctcctccacaacctcaacagaaaaccccttggggtcacacaccctctacgaacataggcggtacctggggcgaagatgacgacgctgacacttctaatgtttggaccggcgtaccatccaatcaacctcaatggggtggtgcaggtggaaatacgaataatggagccatgtggggcggccctaagaaagaaaacgattggggtacaggtgcaagcaataccggtggctggggtgatccacgtgcagctgatccacgtcaaactggtatggaccctcgagaaatccgcccagaactgagagatatgcgggcaggtaatacagaaaccatgagaattatggatcccagagagaccatgaggcaaatgtctaatagtgatatgagaggagatccgcgcggtattactggaagactaaacggagcaggagctgaagcattttggggccaaggtacacctcatgcagcatctcaaccaatacatcaccacaacaaaatgccagtgcctccaggtaatggtacaggcggttgggaagaaccatcaccaccatctcaaagacgtaatatgccaaattatgatgatggaacttctttgtggggtaatcctcaacaagggggaagtatgggccgtggaggtaatcctgccggaccacctggtatgaatcaagcacgcggtatgaaacaacctgaaggttcgatgtggggtggacacggacgcaatggatcttgggacgaaacaggaccaggtgcagcctgggacgaacctaattcttgggcgaaacagaaaatgccggatcctttatgggacgaatctgaatggggacacaaacaacagagcaaaccccagcttaccaaggaaatggtttggaactccaaacagtttaggatgttggtcgacatgggacataaaaaagaagacgtcgaaaatgctttacgcttacgcgccatgaacgttgaagaggctctagacctcctcagccctatgcgcaataatcgagcaaacgacgggtggaatacccgtcacgacgatcactacgaacatcccccgttctgtcaacggggattttctaccggtccaggtggccaattgactggtttccaaccaggaaacaatgctccaaatctcttaaacaatatgtcgaatccaggaacaaacaattcacttattaataacattgcccctgctgtcgtacaaaagttgttgacacaacaacaagggggtggatctcaaggttttggtggttcttcggcgaatgcgggaagaaatatccaaccacagtctcagccttcaacgcaacaactacggatgttggtgcaacaaatacagatggcagttcaggcagggtatctcaatcaccagattcttaatcaacctttggcgccacaaacgttggttcttctaaatcaactgttgcaacagatcaagaatttacagcagctcatatcacaacaatcaataactggtacgcctatcaacggaaaacagaataacgcttatatgcagttttcagtactcatcacaaaaacaaaacaatcaattgccaatttacagaatcaaatcgctgctcaacaagcgacttacgttaagcaacaacaacaccaaagcagcatgggtgcctatgactcatttaaaacgaatcccatgcatgattcgataaacgctttacaaaccaattttggtgacttaggcattaacaaagagcctcaaatgaacccacaacaatcacgactcacccagtggataagtaaagataaggatgatggtggagaattcagtagagcacctggttcatcttccaaacctcctaatacctcgcctaatatgaatcctctcgttctcaatccatcagatggaccatggtctactggtagaacaggagatactggttggcctgattcttcagccaatgataactcgaatgatgtgaaagacgcacagtggtcaaccaccactcaaccttccctgactgatcttgtacctgagtttgaacctggaaagccctggaagggtaatcaaataaaaattgaagatgaccccagtattacacctggttcggtggtgcgtagtcccctgtctatagcaacaatcaaagacaatgaacttttcaacatgaatcccagcaaaagtccccctgccactgatggtatacaatcattaagtctcagttcatccacatggagctttaatccatctggtacctctacatcaagtgcgtttactagtcctcctggaaaattgccaacatctaaagctttaggagatttgaatccctcgactgccgtgacctctgaactttggggagctccaaaatcatccagaggtcctccccctggtttatctgcaaagggaagtggtgctatatcaaatggttggtccgctgttaacactatgccgtggggaccaggaggccaaagaacttccggaaattggggaggttcttcccaatggttattgcttcgaaatttgactgctcagattgacggttctacattacgcacattatgtttacaacatggtccgctcttaagtttccatctatacttacaccaaggctttgcacttgccaaatattcatcccgtgaggaagctatcaaagctcagaccaccctcaacaactgtgtactcggtaacacaacaatactagccgaaaatccaaccgattgggatgcaaacactttgctccaacaagtagcaagtcaacagagcggctcttccggcgcatggcgaggttcaagcaaacaacccactggggcagacacctggagtaccggctggcccaacaattcaagcagcaccagtttgtgggcagctcctcaactcgacaactcagatcccgctcgtggaaccccatctagtctaaattcttttcttcctaacgacctcttaggtggtgagtccatgtaagttaaggatgaaaccaaaataattccatcttagttacaagtgttgatatctctctctgcgctatttcactataaaagttttattgaatgtttttaatgttttataatattaaatttaacaattgtcttagaaattttgatgatatttattgtattatttaacaatcttttttattgttatttgtaaatgtatttctatttttaatttttatggtgatttaagagttgttgttttaa

SEQ ID NO: 10 - DNA, 2230 bp, Diabrotica virgifera virgifera
caataaacgaatttaaaggagtaagtcataagatgcgatcgatgcgatctttgctaacccacttttccctactcgtaaggaccgtgggagttggtacgcaatgcattcggccaatcattatagacaaacattttatacttaatatccagatatacgacagtcgctagacgcgatttgcagacttttcgagagtgtgcgtaactgtgataaaaaactttgagagagtcaaccggtcaataatgggtaaggtagcagcaattggcattgaccttggtaccacctactcctgtgtcggtgtttggcagcatggtaaagtcgaaataatagcaaatgaccaaggaaacaggactacccccagctatgtcgccttcaccgacagcgaaaggcttataggggatgccgccaagaaccaagtagcaatgaaccccaaaaacacagtattcgacgccaaacgactgattggcagaaaatttgatgaccccaaaattcaagcagacatgaaacattggacttttaatgtagtcaatgactgtggtaaacccaaaatccaagttgagtacaagggggaagtcaaaacattcgcaccagaggaagttagctcaatggttctcaccaaaatgaaggaaattgctgaaacatacctagggggaaaagtaacagatgccgtcgtcacagtaccagcgtactttaacgactcgcaaagacaagccacaaaagacgcaggtgccatagctggacttaacgtattaagaataatcaacgaaccaacagctgctgccttagcttatggtctagacaaaaacctcaaaggcgaaaagaatgttcttatttttgatcttggaggtggcaccttcgacgtctctatcttggctattgatgaaggatctctctttgaagttaaatccactgccggagatacgcatttaggtggggaggactttgataacagattagttaaccactttgttgaagaatttaaaagaaaacacaagaaagacttaagtaataatactcgagctctaagacgtttaagaacagcttgcgagagggctaagagaacactttcgtccagtactgaagctagcattgaaattgatgctctacacgaaggagtagacttttactctaaagttacaagagcaagattcgaagagctttgtatggacttattcaggtctactcttcaaccagtggagaaatctttaacggatgccaaattggacaaaggagcaatccatgatgttgttctcgttggtggttctactagaattcccaagatccagaaaatgctacaggactttttctgtggaaaagctctaaatcttagcatcaatcctgatgaagctgtagcttacggtgctgctgtacaagcagctatcctaagtggagatactagctcccaaattcaggatgtacttctcgtagatgtcgctcctctgtctcttgggatagaaactgctggaggtgtcatgaccaaaattgtcgaacgcaattctagaattccttgcaaacaacagcaaacattcactacttatgccgataatcaaaacgctgtcaccattcaagtctttgaaggagaaagagctatgacaaaagacaataatcttttgggaacattcaacctagcgggtatcccaccagctccaagaggtattccaaaaatagaggtcacttttgatttagatgctaatggtatcttgaacgtatctgctagagacagtagtactggaaaacaagagaagataactattaccaatgacaaaggaagattgtctaaagctgagatcgataagatgctttctgatgcagaaaaatatgccgccgaagatgaaaaacaacgtgaaaagattgtggctagaaatcagttggaaggatacatttttagtgccaaacaggctgttgaagatgctcctgcagataagctatcagctgaagataaaaaattggtccaagacaagtgttctgctgttctctcatggctggacgccaatcaactcgctgaaaaagatgagttcgaacacaaaatgaaggaactacagcaggagtgttctccaatcatgatgaaacttcatcaaggtggacaacaaggagggcaacaagggggacaagcgggccaaggtggtcaaggtggaccaaaagttgaagaggttgattaaatcaaaactgtggattgttctatgtttgttgtatatatgtatctaacttttattttattaaatgataattttgg

SEQ ID NO: 11 - DNA, 3599 bp, Diabrotica virgifera virgifera
ccattccgccacatcggtttgttgagaaagatcaaatatttagaagcggtagatttgttgtgtcatattagccatatggtattaatttcgcgattttagctgttaaaatattataaaatagttatttttttggaatatacgtcgatttatcccaaaatatattcagatttatgtattattaagtagattagtttatacaaagaatgatagggcgttgtccccataagcatcattattttagaagctgagacgtgttttaatcgtgcattatgttctttctaatgaactataaaattaaatacttataaaagagactatatttttagtgctactaccaaatttcaggatttttgaaaatgccccgcatagatccggtgcagttattgaaatgcctctcggtacttctaaccccagagggaggaatgaaagcagaagaggtcacccgtttagtgggactaatgacaaaattttcaaagaagttagtgagcaaatgtatatacatactgattttaaagaacacaaaaacggaactgctagatacgtttatggccgagggcggttggaccctcatacagacgtggctgcaagatgcagtccacacgagcaatcggcatttggttaaagaaatcataggattgctactgatcacaccagtggatgttgagagattgaaaacaaatattcttcccaaattaataaaaagtttatcaagaagggatgatttagaagatgttgctgaattatcttctgaattagtcaaacactggcttgtaattgtcaaaggttcaagtaataatgcacaagggcaaccgcaggccgagaaaatggacctttctgaagccgacaacacaaataacagtgttaaagacaatagtacagatagaataagtccaaatacgttttataaaaaagatggacaaactagccctacaaaagaaggggcagacgacagtagtaaggaagatgtagaaatgaaagatgtatcaaaagaaaaatccaaaaataaagatgaaaaacttgacaaggaagacaaagttaaatccagttctagaagttcaagaagtacaagtagtagtaaggacaaggaaaaaagtagagataaagataaatatcgtgacaaagaaagaagtaaaagtagtagttcttcatctaaaagtagttcaagtaagagcaaaagtagtagttcgtcaagtcgagataaagataggagggatcgagacagagaacgggaaaaggagaaaagtaggagagaaaaaagtagagataaggataagagtaaagataaagagagggataaacaaagaaacaatggtgtgatcaaaagtaattctagtaataaggacagtagtagggaaaagaaagaagagaaaaaggataaagaagatgttggaacagtcatcggaattgatttgggaacaacgtattcatgtgtgggtgtatacaaaaatggtagagtagaaatcatcgccaatgaccaaggtaaccgtatcaccccctcgtatgttgccttcactgccgatggtgagcgtctcatcggagatgctgccaagaatcaacttacaacaaaccctgaaaacactgtttttgatgccaagcgtctcattggtcgtgacttcacagaccatacagttcaacatgacttgaagctcttccccttcaaagtcattgaaaagaaccagaagccacatattcaagtagaaaccagccagggaactaaggtctttgcccctgaagaaatttctgctatggttttgggaaagatgaaggaaacagcagaagcttatttaggcaagaaggttacccatgctgttgtaacagtacctgcttatttcaatgatgcccaacgtcaagccaccaaagatgctggtaccattgctggtcttaatgtcatgagaatcatcaatgaacctactgccgcagctattgcctatggtcttgataagaaggaaggagaaaagaatgtattagtatttgatttgggtggtggtacttttgatgtgtcccttttgactattgacaatggagtatttgaagtagttgctaccaatggagacactcacttgggtggtgaagatttcgatcaaagagttatggatcatttcatcaagttgtacaagaagaagaagggcaaggatatcagaaaagacaacagagccgtccagaaattgagaagagaagttgaaaaggccaagagagctttgtcttccagtcaccaaaacaggattgaaattgaatccttctttgaaggtgatgatttctctgaaactctcaccagagccaaatttgaagaattaaacatggatcttttccgttctaccatgaaaccagtacagaaagtattagaagatgctgacatgaacaagaaagatgtagatgaaattgtacttgtaggtggttcaactcgtattcccaaagtacaacaattagtcaaagaattctttggaggcaaagaaccttcaagaggtatcaaccctgatgaagctgttgcttatggtgctgccgttcaagctggtgtcctctctggagaacaagatactgatgccattgtactattggatgtcaatcctttgaccatgggtattgaaactgtaggaggtgtcatgaccaagttgatcccaagaaacactgtcatacccacaaagaaatctcagatcttctctactgcatctgataaccaacacactgtcaccatccaagtatacgaaggagaacgtcctatgaccaaggacaatcacttgttgggtaaatttgacttgaccggtatcccaccagcacctagaggagtaccacagattgaagttactttcgaaattgatgccaacggtatcttgcaagtttctgctgaagacaaaggaactggaaacagggagaagattgttatcaccaacgatcagaacagattgacacctgaagacattgaccgtatgatcaacgatgccgagaaattcgctgatgaagacaagaaacttaaagaaagagtagaagccagaaacgaattggaaagctacgcatactcgctcaagaaccaaattaacgacaaagacaagttgggagctaagttgtcagatgacgaaaagaccaaaatggaagaagcaatcgatgagaagatcaaatggttggaagacaatcaagatactgattcagaagactacaagaaacagaagaaggaattggaagatgtcgtgcagcccatcatcgctaaattgtaccagagcacaggtggcgccccacctccaccctcaagtgaggatgatgatgaacttaaagatgaattgtgaggtgaattgtaggccaaaaagactgaaaaaacttgtgtggatgcgtgagaatgcggacgatcgtgtgttatttaatttccgtgactgttatccctttttttgtaatagacttttttgtaaattttccggtttgctcattgaatgggtgaacttatttatttattattttgcgtgttaggtacaggcgtatgattgtgatatatattttttgtattaagtagtaaatgcattgtttttgtatattgtacacctgtatttgactattctcaattttcctgtaatttttcaataaaattacttgaaaaaataaaaaaaataata

SEQ ID NO: 12 - DNA, 3954 bp, Diabrotica virgifera virgifera
atttatactaagaaaaataataatatttattaaatagattagacaatcatagtgaaagagggatatgtagattctttgtttccaaaggatctggttgaaaaggagaggtggatttcattactaaggtaagaaaatatagtgaagaaaaagtggggggcagcttacaaattatgccaccatgagaagcactgtcgacatgtcaatatcccctccatgtcaaccctcctagcggatactgtattcttaaaaagttgatatttggaaaattcccgacacttatttactattctaatgttttggcaacgctgtggggttttgacgtcagaaatcttgaatgacgtaagcttatttttaccttatttttgtagtaaaaaatcatacacgctaataatgacaaattaagcaaaaaagtcgattaaaacaaaccaaatttggattgatgcatgagtatattgaagaatctcatatacaatatatattttgcatatcatgtatagagctagttgtgtggggtgacaatgacgtaaccatatttttgtagtaaaaaccatacacgttcataatgacaaattaagcaaaaaaccgattaaaagaaaccaaatttggattgttgcagtattgcactggagaatcgtatataaaatatatattttgcacctcatatacagaactgcttgttctgtagaaaagctactcttggagaccagcatttctgtggcaaatataaaaatatgtaactgtattaaaaattacttatctggtagtatgtacgttaaaaccagtcgtgaaaaaaaaaccgggttaaaaaatcttattttaaacattgtacaaagagaaactcactaaaatgatcgtgtacacacgcacaccattcacaataattttatttcataacaaaattagagatctcaaacgttcgtaactattatacagcatgtttagtttcaaattagatatacgacctataaatggcaacactgtacgccgtcgagtacaagacggtccccacttcccacgctaatgcgcctgactgtcacggttcttaacttacaacggttgcctactccgactgggatgaggacacttaaatgcttgacttacgtcacaagagtacacaaactcatttttatcagtttgttgtggtaatgatcttcgatctttgagtgtatactgtgtattattggtgttattatttatcttatatatcctagtttactctatatttttgtatttgaaattttggtgttgtttcccgtaaaaacatattttgaattatccatgaaaagttatttattatagttgtacatcgtacctattgcaggagcttaaataagaatatagatttataaggtaggttaaaacgttaaaaattttattatgtattaacgtaataataaagtttatgacattttagaatggcaggtacaggctgtagtgtggaataggtacctattatttaaattcttacaataaattatacaagtaattctgattctctaagtaaggtttgatggaaattcagtataagcgacaaattttcagtgtagaatggagattgaagacgtagatttccgtaaatcttgcaataaccgctggataaacgtgaacaaccgttcctgataaattttgaataccaatccaaccaaatatcaacagattttcataattaggcattataatccactaaatatctttatttcataactatatttactattctccatacattagacataaaaataccgattaatcatattacgattcaaattactgtactctcgtgacgtaatggcgggcttaatgttcattggttagtcggagtaggcaaccgttgcaagtttaagaaccgtgccggattgtctgcaaataattaattataagatggctaaagccccagctgtaggtattgatttaggaaccacatactcctgtgtaggagttttccaacatggcaaagttgaaattattgccaacgaccaaggtaacagaaccacaccatcatatgtggccttcacagacacagaacgtctcatcggagatgctgccaagaaccaggtagccatgaaccccaataacacaatttttgatgccaaacgtcttattgggcgtcgctttgatgacagtgctgtacagtctgacatgaaacattggccatttgaagtagtaaatgatgcaggtaaaccaaagattaaagttgcatacaagggcgaagacaaatccttctacccagaagaagtcagttccatggtccttacaaaaatgaaggaaacagcagaagcatacttaggaaagaatgtcaccaacgctgtcatcacagtacctgcatatttcaatgactcacaacgtcaagctaccaaagatgctggaaccattgctggactccaggtattacgtattattaacgaacccactgctgctgccatcgcctatggtttagacaaaaagggccaaggtgaaagaaacgtcctcattttcgatctgggtggtggtacttttgatgtatcaatcttaacaattgaagatggtatctttgaagtcaaatcaactgctggagacactcacttgggaggtgaagacttcgacaacagaatggtcaatcactttgttggagaattcaagaggaaatacaagaaggaccttaccacaaacaaacgtgccctccgtcgtttgagaacaagctgtgaaagagctaagcgtaccctttcctcatcaacccaagccagcattgaaatcgattctctatttgagggtattgacttctacacctcaatcaccagggctagatttgaagaactgaacgctgatttgttcagatctaccatggaacctgtagaaaaggccatcagggatgccaagatggacaaatctcaagttcacgatattgtgttggttggtggatctacccgtattccaaaggtacaaaaactgttgcaagatttcttcaatggtaaagaattgaacaagtcgatcaaccccgatgaagctgttgcttatggtgcagccgtccaagccgccatcttgcacggagataagtctgaggaagtacaggacttgctcttgctcgatgtcactccactttcattgggtattgaaactgccggaggtgttatgactgccctcatcaaacgtaacactaccattcccaccaagcaaacccagaccttcactacttactctgacaaccaacccggagtacttattcaggtatatgaaggtgaacgtgccatgaccaaggacaacaacctcttgggaaaattcgaacttaccggcattcctcctgcgccccgtggtgtccctcagattgaagtaaccttcgacattgatgccaacggtatcttgaacgtcacagctattgaaaaatccaccaacaaagaaaacaagatcaccatcaccaatgataaaggtcgtctcagcaaagaagacattgaaagaatggtcaacgatgcagaaaaataccgtaacgaagatgataagcaaaaggctaccatctctgccaagaacgtcctcgaatcatactgtttcaacatcaagagcaccatggaagatgacaaaatcaaggacaagatcagcgaaagtgacaaaactaccgtcatggagaaatgcaacgaggttattgcttggttggatgctaaccaattagccgacaaggaagaatatgaacacaaacaaaaggagctcgaaaacatctgcaaccccatcatcaccaagttgtaccaaggtgccggtggagctccaggtggcatgcccggtggtttcccaggtggagcagctccaggagctgcaggcgccgctggaggtgctggaccaaccattgaagaagtcgattaaactattcattccattttttaaacttttgttaaccgttgtgcagtattacttgcagacaaagctttttaaaattacttttttttacacaatttttcaattgttaaacaacgtttttggtaacagttc

SEQ ID NO: 13 - DNA, 2168 bp, Diabrotica virgifera virgifera
ataagttgcttatcgatgcgtttgagatgaagcaggagcgagagatatttttgaatattattaggtgcctaattgacaagaaacagtataaagaggcttgtcaatatactacaatgctaaaccttcacgactgtttcgacattgacgatttcttaatacctctcatattacaagatagactttacggagttgatgattttttaaaaaataatccgaaagtataacaaaatgcatgcaaaaccttggaaaaaattaatagctagaatggtgaagatgtttaaattaccagctgatttgactcccaatttaaacagaagaagaaacgaaggtgctctaaatttcctcttgcacaagaggtatattgaaaatagttttggggatgaaagttggaaagaaatggcacaagaagctgtcggggatgaggaggagttacaaaaggaattagtttaccaggttgctcaatatggtgattttgcagaagcgcttcgatgggcgcatttttataatattgacaggaacgagtggccgcacgcagtgagaatgcttgaagaaaatccggatggcaatagggaacaacagaaaatagtacagcaggacatcatctggaatgacgacgaaatcgagcaaccgtctgaacaaatcgagtatcataaaatgacattgccaatgagtgcaatatgtttaatagacgatccattaaaatttgaaaattttttagacatggcttctcaggaggtagatataattggcatcgattgtgagtggaaacctagttttggtggtcagctaaacgagttggctttgatgcaaattgctaccaggaaaaatgtgttcatattagatattatcaatattggcaacaaatgtccacatttgtggcaagaacttggaaagttcttttttaacaattgtgatatattgaaagtaggttttagtttaactggtgatattcatatgataaggcacgcattgcctaatcttaatttttctacaaatcgagtaggagtattggatctgtgttcattctggaaacatttggaaaaacatccggaagtaaaactaccatttgaagtacaaaaagggggccctagcctaagcaccttcctaagcaccttagtccattgctgtttgggttctcctctagataagtccgaccaattttccaattgggagaagaggcctttaagggacagtcaaataacatatgcagccttggatgcttattgtttgatacaatgttacgacgtgctacgtaagagctgtgaagaagttgggtttaactttgaggacgcgtgtttccaactcatgacgaatccaaaaataacgaagaaaatgaacaagaaaactgtaaaaaagaaggaagcggctaaacccaaagaagaactcattcagcctccgtctcctcatagtgaccaagtacctgccgaacaaatgaaagtcgtctgtgatacaatgctgcaaggtcttggcaagaaattaaggagttgcggtatcgacactgccattctggaaaatcatcaggaccacactgagtgcgttaagtatgccatcgatgaacgaagatatatcttgacgaaaggatatgaaacattcaagctgttatctggatatgttcctaaaggacattgcttgagaataattagtgagaacgtagatgaacaaattaaagaagtgataggttattataaagttctcgttacaaaaagtcacgtcttcagtagatgccaggcttgtaatggtaacaatttcatcaaattgtcaagatcaacaatggatgctttagaaaaatcacaaacatattgtccccctcctccttgttattacgaagacgaagctacagggttttcaagtgatgatgcagatgaatattatgaggaaattccccaaaaatggacaccgtcaactggacgaaaatgggatctatatgccgatgaaaacgtggacgtaggattatgccagactcgtctaggcgccaaaattcaggtcagttctgttcccaagcctcttttacaaaaatacgactttttctacgtctgtgaggaatgtgggaaagtttattgggacggaactcattttgaccgtgtagtggctggaaggcttcaaggaattgtgcaataaaaacaatatcttttttatttaatattaaccgttgttaacaacaatattat

SEQ ID NO: 14 - DNA, 2711 bp, Diabrotica virgifera virgifera
ctggaaaattatgtggtggaaaattattatgcatgcttatgttgttgaaatgtgttaaattttagtgtaattaattttcatagaatgttgtatttatataaatgaaaacgatgctttcatgtttttaaaggtttatgccctaggaatagggtagtggtaccactgattggaaaagctgaataatcatttttcaggtcattcaggtgtccttaatatttcactgttttccgcggtactattcaattaatatttcaattctttgttcgaaattggttggaatattcttttgatcgttaccgtgtggagactaaacatcaaatttctataaatcaataccactatgaatggaagtgtagaagcaagccaagactcctcaagttgcccattctttgggaaaaacttacaaaatggtaatgccgagcttaataagtttcatattttggatgaaactgaaggaaacgatgacactgataactcagcagacttcgactctgatattcctgatgatgaaattgaaaaaatgttggaagaggccttggaaaaacggaagagaaaagcagcagatgccgggttagacgacgaagaaattccattcgaagaaaaaaacaagatcctcttaattgaaaaaggacaaaaccacttcgacgttcttccagaagggtggattcaagtaacacacaatagtggaatgcctatttatttacaaaaagtttctagggtttgttcattatctaggccttattttctaggtccaggttcagcaagaaaacaccatatacctgttaatgccataccatgtttaaattacagaaaagccttagaaaaggaagaatcggagtccaatgaaccagaaaccaacaatcattgcgatcagagctttccaaatgctaagatcgaaactgttcaggagaatcttcaaatgcagaatctccctcctgaacaggttcgggagtattgtgagaagctatttaaattccagaccatgaaagtattgagatttaaatcttggtctgaaagaagaaaatttacgaaacgattaaaaccaaaaaagcaattacaacgactgacacttccagatggtaccaaattaataacctttccaattagaaaatcagatagttcggaaaataacacgaattctaaaaaggaatgggtcatgaaccccaacggaaaatcgtatgtgtgcattcttcatgaatatgttcaacatgttttgaagaagcaacccacgtatcagtttacggaactagaaaatgcagcaactccttatgctgccacagttattatcaaagatatgcggtacggagttggatacgggaccagtaaaaagcaagccaaatctgacgcagccaaggctaccctagaaatccttattccggaaatgaaatcaaagattgttcctgataatcaaacaggggattctacgaaaaaagacaaagatcaagatctgtctttctttgacgaaatacgagtagaagatcccagagtttttgaattttgtgccaaaactaccgagccagctccgtacgacatacttttgacttgtcttcagagaaatttcggcttagacgaccttcaaattagttatcaaggaaatacttcaaagtcccatgaattcaccatgactgtaggtaaacatactgcgactgtatcttgtaaaaataaaagggacggcaaacagagggcatctcaagcaattcttcaagcactacatcctagcattacttcatggggttcccttttgcgactatacggaaaccattcgatcaagagcttcaaggagaagaaattagaagagcaagagattacttctctgcaaagtaaagcggctgtaaatcaaccaaactatgccattttatcgaaattgaatatagaactaggtaaattaagggaaaagcgtaaggccatacagccgatcggtgtattagataccgatggaactgaagtagtagcgccattctcttcaacttctaatttgcataatttagctgtgtaatcctagatattgtagtagtccaatgtagagttggtaaatattcgaaaaaaatcagtcacaagacaaatacctaatttcatatacgtattatacattccaaacatacaagcaacatttcctgtatataactactagtcaagaaaagaaaatcatctattcctaagatctaagagatcactaaggtactattgccttctagaatgctaaaaaatcagtttcaacattttttgtatgttatttatatggcaatttttttatattatacaaattttgaaagttacaaaaacactttttcattcttcctgtattttttcgtcccaagattactgctccatggcgacagttaatctctggaccggcaaatctttatctttatcatttgtttgtatttcttcaactggtgtaactttactttcttcttgttttacttcaagcttcatagggaattgctgtaaatctgaataaacaaatgcatcgtgcacactttctttcttaacctccgctttaatttcaattttacatgtgtccattaatgaatcatccatcgtattacagtatatttctgttttagaagtctcctcattaacctctggttttatatccatattttacagctaaattactaaactataaattttataacgaaaacggaatatacataataatatacgttatttaggtatgttgcagaaaaagaacaccagcaaacaccaga

SEQ ID NO: 15 - DNA, 4219 bp, Diabrotica virgifera virgifera
atctatttgtaatcatagtttatattctttgtacaaaatacaggatatccagtaaaacaaaaaattaaatttggcatttgttgtcaggttgtcagatatttgtcaaccaaaagagttcgctagtgtagccggcaacagtcaagttggaattgttgcacatttttaataaatatttaatcatatgttgtaaataaactcgaagattccgtaagtctgttaaatctgaagtatacaaattgctaacgcatataattatccaccatcaaatacaaaccctcatgacaaataatctcgcataatttgcaaacattaaaagaccatgctgttgaccaaggtgcttttaatagatttattattttagctgccaaattgccaatatagtttggaagtatggctggaccagacgtggcagcgctagctgctgacttagcacgtgctgtagaacttactatgagtacaggagcttctcaacaagacagactaagggcttatcaagcatgcgagagttttaaggaaacttcccctctttgcgctgaagcaggcctatatctagcagctggcactcaacactcaccaatatcaagacattttggccttcagctcatggaacatactgtaaaatatcgatggactcaaatatcacaacaagaaaagattttcattaaggaaaacgcaatgaaattactttctgctggaggtgttagtgatgaatcccacatgaaagatgcccttagtcgtgtaattgtagaaatggttaaacgagaatggccccagcaatggcctggtctattgggagaactgtcagatgcatgtgcctgtggggaaactcaaactgagcttgttttacttgttttcttacgtctcgttgaagatgtagcattattacagacactggaatctaaccaacgcagaaaagatatttaccatgctctgacagctaacatggcagtgatcttcgacttctttctcagactcatagaactgcaggtcagtcagtttagactcaacagtgagtctaacgttaccaaagccaatgctcacggaagagtggtccaggtggttttgttgactcttactggctttgtagaatgggtttctatgagtcacataatggcccaaaacggaagattactacaaattctttgccttctgttgaatgatactgcatttcagtattctgcagcagaatgcctatcacagattgtaaatagaaaaggtaaagtggaagaaaggaagcctttgttaatactattcaataacgagccgatggaatgcatcctcaatgctgccaaaaatcctggaaccattggagatgaacaacattatttgtttaaaaagaaattaattcaggttatgggtggcttgacaactcaagtgtgcaccttatggggtaaagacggcctcgcccgcccatctaacttctcgatgttcctcgaggctgtcctcgcttacagcagccatcccagtctcaacatcgcccatgctgctaaccctctgtggaaccaaatgttaaaaaacgaacaagtggccagagatcccatctttttgtcctacataccgcagtgggtgcaatgcacggcaccaaagataatcaagtttaattatcctgtcggtaagagtccaactaggagggatcttggggagaacgccttgtacgctaggctggatttcgatagcgatgaggagttttccggttatttctacaggtgtcgatcagactttttggattctttcaggcaagcaactgtagtagcacctttagtaacctttaattacgtcgaacaatggttaatgaagtgcctgcaagttccaaacgtcaccgctggtttatcgttcttggatccggtatatcaagagtgggaagccttatccaattttctggagagcatcttgagtagggtcttgcaagcaaacggccgccctcccattgcttcgggcctgagattacttcagttgtgtttgtcttatcaaccagcggatgctttgatcctatcaaccctgctgacttgcatttcggcgttgtttgtatttttgagtatgtcgactggacaaatggcccctacagcaaattctgtggcagcttcaggtgccgcactcttaccccaagtactcgaaaaaatcttctcaactctagtctacactcccgaaggccagtcaatcaacaaccgatccagagccgtgaaaaatgtcaggcgtcacgcggcttctctaatggtgaaaataggcaacaaataccctttgctgctactaccggtcttcgatcaaattagagccacggtagaggctctatctaggcccgagggacctgcgcatttaagctgtttggagaaggttacgttgcaggaggctctgttgttgatttccaatcattttggggattacgacaggcagagtacgtttgtgggggaagtgctaagggaagccaatgctcaatttttagaaatagtcaatttaggtgcatttagaaacgcagcaaacttcatcactttcgtcggattggacaaacctccggttccctccaacagtgaagacgcctgcggcataaacaggggcaacatcatcttttgcgtcaacctccttctaggtgccgtcaaacgttgtgcttggccagacgatcctgaacgagcgacccgtggtggatttgtggtgtctcttacagaatctggcaaccctgtatgccgaaacccggcagctccccacgttgtacctctactgccacatattctttctttaatcaagatatttaacgaactgttcactcctgagactcaaagtttaattcatgacagttataaaggatgtttagcaatgcaagagactgaacgaatgaacctcctcggattgatgggccacactataggaactgaagcagcggaatcacaagtggtgcaaagcccattagagaggatgcagcggttccttactgcattacacgaagcctgctatcacatgatgggctctctagggccctctttaggaagagatctgtataatataccggatcttggcctggcgatcgtcaacagtgttttgtcatttatacaatatattccagattatcgaattaggccgataattagggtgtatttgaggcagtttattttctcttgccccgcaccattttacgaagtcgtcgttctacctatcatgacacatctttctcccataattttgtcgaggttacatacaaaatggcagcaagttatcgagttccgcaatcgcgaagcccaagaggacaaccaagacacccaggaagtactagaggacattctgacccgcgccataactagagaatacttagatcttttgaaagtcgctctggtaggcggcagtgtcactccggagtctaattcggaaacgatggagactgaggagcacagtatggattcccctacaccacctcatactagaactaatatgacaaatgaagttatttctgatttagggttaatgttgctgcgcagcgagaaaacgtgccattcgattgtgctggctgttctcggtgctttggcgtggatcgacagtcaggcttcattcaaggctactcttttaacaggtccaatagttagacagctagcctcggataagtccctcaacggcgaagtggcggctcacataatggcagcggtcctaaacgctctcacactgcacggacaacacgaatccaatcaaggttctctattgactttgggcgctcagatatacgaattactgcgaccatctttccttgaagttctcacggtgatgcagcagatacccggcgccaatccggtcgatttgcagaagttggacgaacgaatctctggaactacgagtaaagggaataaaatcgagaaggtcaaaaaggatttgttcaggaagatcaccggaaatttaataggaagaagcatgggccaattgttcaaaaaagaagtaaaaatccacgacttgcctcgaatagtagtacagaaaaagccggagcatgagcaagaagtgatcacaaatttacgaaccgttttcagttagtgaattgtacaattgttttagaatatgtatgtaatttattcgcattgaacttgtacaacattccgtgttgttcaattgagattgactggtaaaatcgtaataattgtgttatggactttatattattgattatatttgcctaatttttgtatatactttgttagtttatttataattcttttttgtttatgatcaaaataaagaatataatata

SEQ ID NO: 16 - DNA, 2382 bp, Diabrotica virgifera virgifera
ttgacgtatgaaaatcaaggttgcaaaaatacaaattaagttttttaaaaactccaagaaatataataattacataaagaaatgagataacgaataatcaattaactttttaactgcatttaaaaatatggctacaatcttaggaaacgaatggcatatatcttccaaaggaaacgaaattttaacgggaaatgtatcgacgggggataaacaacagatttataactttgctttaaatacagatctaaaagaaatatgtagcccaattgttaactcttttccaattgatgcgacatcgaatgtagtgctccagattcacaagatccgaaacatttctgcacccaaagctaatgaagattcccaagcagctcctcggatgctcaagataactctaacagatggagaaaactatattcaagctttagaacttacaacaattagcacaataaattataaaacaactccacctggaacgaagctgttagttcaaggagctaaacttacatctggtttcctgttactaaatccacaaaattgtaaagttctaggaggtaaagttgccaatttgattgaaaagtgggagcttgccaaaaatgttcaaaaaattagtaggaactataatgaggatggtccaccaccatgggtcaattttggtaccaaaattcaaacaggaaaccaaggagagaacttcaaatcactgaccaataaagaaaaggaggcattaaaggaaaattcagaatttgaacaattgagaaaagatgcaattgcagaggcatcctctggagcggttaggaaagtatttagtggtagagtgacacaaaatgtgcagttacaaaataacacaaataaaagaaacccagaaaggactaaggaaaagaaagaaccatttaaaggaaaaggaagaaccatgaaggaggtggacgataaacctcagaaaccttcagagaaagtttctttgtttgcatttcttgaagataaacttcctgtagccaccaaggaggaaaaattgtatcaaagtcaacccattaaaaataatttcagggacccagaagttctctctgaaaatataaacaaatttgacaaatatgatcacaagtataaaaaaactcaaatagtaccaaaacaatttgaaaaaccaacatataacaacaataggtatcaaagtaacaaagaaaccaataattctagaccaaatacaacagaagcttctcatcagccaaacaaaagtaatttggaggtaacggaacaaaaaccagtgaacaatgcaatgaaatctaaaacatcctatactaacagatatgaatcacaacaacaaaaacaaaatgtagatacttttaataagccgaaacaatcgaataataacttcacgggttacaactcaaacaaccaaaacaggaatcatcagcagcaaaatagcaattctcactattcacagtatgtacctcataattcccaaccaaatgcatttcaacctaataatgtaccatataatatacaaaacaggaatcatcagcagcaaaatagcaattctcactattcacagtatgtacctcataattcccaaccaaatgcatttcaacctaataatgtaccatataatatacaaaattcccatccaaatagaagcaacaatcaatattcccatcaaaatcctaatgtacataatacaaccataaacgtaacattaaataaccatcaccataatcagcaaattcctactcagcctagaccatctacaaatccaagtaggccttaccaaaatgatgtcaaccatatcacccaggaaacgcaaagaatgtctatcaatagtcaatttgctagtagaagtttgagacagcatttaaacttgaacccaaacactcctaggaaaaacgaggattatgcagcgaagggtgaagataccatgcatggatgtaatgtaggggatgaggtgttggccaaatattgggaagatggcaagtattacaatgccacagtaatctcagttactcctcgaacatttgctgttcggtttaaaggatatggaaatatcgaagagatattaaaaacagattgtttaccagtaccgcaaaacaatgcgagaccaagcaataatcaaaatcagcaatatgattataataaacaatactcaggttcaatggaattccgaagaagttccagatactacaaataagttagccaactttgttactgttacgtcttttgcgtgtagtctacagggtgttctcgaaacaatacaatctcctcttttacagtgccgcacagtgatggaacgaagagcatcgtcgtaattccaataatagcagtattcaaatctagaacattctgtatatttatatatttattgttgatctttacgaaatggacattttataattaata

SEQ ID NO: 17 - DNA, 2780 bp, Diabrotica virgifera virgifera
gcagaagctagttatagaggtggggcaaaggaagccaagcttaaattgacgaaaagtttactttatttattttaaaatttattatctcaatatttgaaggtgactagttaatcaaataataaaaatttacaattcataaggtgtacatatttgtatgctataaaatatggctgatagtgatgatgaatatgatagaaaacgccgagataaattccgaggagaaagagcagaagctagttatagaggtgctgaaagggtagcaagaccaagggacgaatgggcagaaagagaatcgatgggtgctcataccgaaggccaacaaccacctatgatgtcttttaaggcttttttagctactcaagatgataacatttctgatagcgaggctatagaaaagtacaatgattataaactagaatttcaacgtcagcagcttaacgaattttttgtggctcataaagatgatgagtggtttagacttaagtatcacccagaagaatctgtaaaacgaaaagaagagcaaaaggcagctttgaagagaagagttgacgtctttatagagcttttaaatgctggcaaaatagaatgtgttaaggtggattgtgcggaaaccaataaattacttaaattactagatactgttgttatcaaacttgagggaggtaccgatgaggatttggctgctcttgaacaagagtatgaagaaatggaacaaaaatacagagaacaaaaagcgaaagaagccgaagctgaacgagaaaaaggcaaagatcaagaaattaaaaaagagttagaaggcgaaaatccaaaacctgtcgatgaagagaagccaaatggtaaagccgatgacaatgaaaaagagaaggaggaggatgaggaaaaagatgaggaaattgagaaagtagaagataagatagaagctgaatctgaacctcaacccgaaattgaaacaataccttcagaagacatagaaaatgagaacactgaggaaaaggagtgtgaagctggagaagttcaagataaaccaacagaaggtgaagcgccaacaatagttgttgaagaaacagaaaaaacggaagaaaatcttgaacccgctgctatggatactacagatgcaccagagaaagacggggaaaaagcggttccttttaaaactaaagagaaaaaacggaaacgatcatattctggtagcagcagcggttcttccagcagtagtagcgacagtgaaaatgagggtatagataaggatgctaaagaagaggatgtcgaagccgacaacaacaaaagggataaggatatcccagttcatactattgatgaggacgatagactcaaaattgaaaagccaaaatctcttcataaaactacttcgatattcttgagaaacttggcacctattattaccaaacaagaagtagaagccatgtgttctagatatgatggttttcttcgtgtggcattagctgaccctcagcctgacagaaggtggctgcgacggggatgggtgacattcaaacgtgatgctaacataaaagaaatatgttggaacttaaacaacatacgtttgaaagaatgcgaattgggtgctatcgtaaatagagatcttagtcgaagaattcgtccagtgaatggaatcatagcccataaacaggtcgtgagatcagatataagaatatctgctaaggttgttttacacttagataccaaagcaggattgtggttggagaatgaagataagaaagctaagccccaacagacttttggactattatccaataatccagtattacataatataactgattacttaatagaagaagccagcgctgaagaagaggaacttctaggtttagatcctacaacagatgcccaagatgctacatctgtagttgaaagagatgaaaatttgataactgttttggataggattattctatatcttagaatagtacattctgtcgattactacaatcattgtgactatccgaatgaagatgaaatgcccaatagatgtggaattttacatgcccgagggcctccaccgactagtaagaccgatatgacccagtttattggtttgcccatagaaaataaaatggctgccttcttaccagaaaaactacatcaagaaaaagacaagaacgaatcgaagttagttcatttggcgttaaagaacgtagatacagaaattgataaatttgttcaagttaatacaagagaattggccaaggataagtggttgtgcccgttatctggaaagaaatttaaaggtccagattttgttcggaaacacatatttaataaacatgctgagaaacttgtagaagtaagaaaagaagtcgaattctttaataactacctaaaagatcccaaaagaccaatgttagcagaagctcctcaacaaaaaagggaagaacctgctagttatccacatatgtttggtggtggtggatatggtggttctgggtacactagacctgctccattttacaatcaaagtttcgttccgagaacaagaggttaccaaccaagaggaaggggaggcccaacagatttcagaccagttatccattacagagatctagacgccccaagagaaccagaagaatttatttgattgatgtatttgttttaatattaggtggcagtttttttattaatttgcttcttcctaaagatatctaaatggatttttccaatgttaatgtattagttcaggatgatttttatatcgattatgcttttagtagttaataaagcattcacgtacaaaaaaaaaa

SEQ ID NO: 18 - DNA, 5230 bp, Diabrotica virgifera virgifera
gacacgtaaatgtaaataaaataatttttattttacatacacatacaatgaacttaaaaataggtcttgagtgtgatggtgtgatgcaattttgatgtcatgattcatcattataatctgtaattgtgggatttacacaacaatccaatgttacagatttttttgccaatttaatttttttcacaatataatattcgtaggtgcagaagaaaataattctaccggagtaccggttttgataaactttgtatttattagaatcaaaatgagtagccaagacttgattcctaggaactatcaagttcttttgatgaaaatatgtcttgagcaaaatactattatttatttaccaactgggtctggtaaaacatttataactacaatggtcctaaagcaaaaaggagaagaccttttaaaatcatacagtgagggcggtaaaatctctataatcttagtgaataccgtagcacttgttgatcaacatggatcttacattaccaatcatacaagcttctctgttggaaaatatactggtgagatgaatctagacttctggccaaggactaaatggtttaacgagtttaaccaatatcaagtattgataatgacgtcacaaattttggataacctatccaggactgattatatagatttgaacaaagttaatctgttggtttttgatgaatgccatcgaggcgtaaacgatcataccatgagaaatttaatgaaacgatttgaacatttgattgaccctccgagagttattggactcacggcgactctgttaaacggcaattgtcaaccacatgaggtgttaccgaaaattaggagtttggaaacaacgtttcatagtaaagtcgccacagtagaagaacttaaagatgttattggctattccacaaaccctcaggaacgtaacgttggatttgatagacacagtcttgacgaagatgaggtgtttgttatgactagattagagaaaaccattcaaaatttgtcatcgataaaaggaaatccgatgccaattactttaagtctaaaggggttggtaccaatacgcgcagaagatggacaaaaacgtttaataaatcttcttaaggatttgaagtatcatgttgaaaccatgggtatatatggtggatcaaaagcttgcgaagtgaatattataaaaattgaaaggttaaagaaacattgtgaagacatgaagctttccatgatctttgactctgtgcagaccacgctttcgtttattactcggaagttaaacaaacgcatggaggatgtctccgaaaaggagaagatatatctatattcttcagaccaaattaaacaactgattcggatatttaacgattaccaacaaaaaaagggcactgatgaaatatgctgcatagtgtttacgcagagaagatctacagcgcaaattttgtttcatattttgaacgcgttgagtcaaaattatccccaatatagttatatcaaagccaattttatagttgggcataacagtaatccttataatgacactagggaactgttatatttacataagaaaaacaaacaaattttgaacgatttcaccaacaaagacatcaacgtcttggtatcatctaacgttctggaagagggtgtagatgtacccaaatgcagcctagttataaaatatgactgcccgatggactacagatcctatgttcaatcgaaaggaagagctagacacaaagaaagtctttactatgtcatggttgaagtagggacctaccgaagtttcactcaaagggtaaatggctataaaaaaatcgaggacatgttaaatcagtatttagtcggaagaaatgacgagagagaagagatttcagaagaagatctccaagcgatgtacaacgaagacgaaattcctccatattttgctaaaccaggtggcgcttgcgttacgatgctatcagcaatttctttgctgtgtcagtattgcacaagcctttcttccgacgtgtacagtgacgcagctccggagtggtataagaaagacagttttgaagacggtaaagtctctgttgttatcctattacccactggttctcacattctagatgaaattcagggggactatatgggaaatataaaactagcaaagagagcagctgcattcagaacctgcgttttgcttcaccaagtgggagaattggatgaccatctgttacccgtaaagaaggttgtaaaagaagaagacgtgagttttctgtttacccattacccggataaacaaaataaaaagaataacagtttaaaaacacgcagattacataaaaagatggttccggacgcacttaaagaacaaatacgaccttctacggtttatctacattatctccagttaactccacaatttagtagacatagtttggacattaatcaatcaactcttcatgatatgtacacgtcttctttaagctttggcattattaccacgtcaccattgccaaccatatgtgatttcccgatttacctcactgccggtacaatacaagtttctctaaaagtaaaccacggaacactgaatatcacccacgcagatctggaagacatcaaaacgttccattttaccgtttttgacagcgtcttggaaattttaccgagatttttaactttggataccagcgacgatgcagaaatgatgctgttagttcctgtggataaagaaagaaacgatatagattggggcgttttgaggagcaaggttgctgcgcaacttgttaatgaattaagcgaagaacagaagattaatttggaagtaacacaagagactcacctgaacaaaattgttaatccatggtacagacgggatacagctacatatgttgttacagaagtatgttttaataagtctgccagatcgccatttccaaatgagagcttcagtagttttgtagaatatttcaggtcaaaacataatattactcttataaaccctgatcttccattactaagggttaaaggattaaccaaaaataggatttttattaagccaaaaggtgcgtctaaaggaaaaagagcatatgaaacaaatacggaattggaagaatatttacctcctgaattagttgtgaaacaagaatatccagcctctctgtggattcaatccagcttcatgccaacgattctaagtaggctttcgtttatgctacaattagagcaactaagatgcacaatcgttcaagaaacaggaatgggttcagttattcataatactaggaaacctctcgaattggatgagtaccttctagactataaaccgtatgtagaagaaatacctcatgatgaagacacccctatggacatcgatcaagtggatgctgtccaggctttgcctttaaacgccgtatcaagaatcaacaaacaattcacaaataaaatcatagaatcacaatatccgtggaaagatatcgaagaacctcttgatgttgaaagggaccttaatgcaacagttttagatgtggaacactacgagcagtttttgggttttaaattgacaccgtctacccgtgaattgaaaaatacttctcctattaaaaggaaagaactattggccttaacttacgataaaagttttattcctaccaaaatcaacttactcgaagttcaaccagacgagaaaggtccagaattatgtgaattttacagggcgttcacgtgtgccaaagccaatgacatcgttaatctggaacgtctggaaacccttggcgactccttcctcaaactcatttcatccgtctacatatacctgaaattccccaaatacaacgaaggtctggcaaccgccttgaaaggcagattggtcagcaacaaaaatttgctttatctagcgatgaggaaaaacctgcagggtatcattaaataccatgaattatcaccacaaaaagaatggttaccaccagccttcaccattcccagcgaactatcacaaagaatagaagataaagaactctccgttagtgcagtgtttggattcaccattcctatggaggaacaaatttccggtgtcttaagcgaagaaactaagcaggagatcgccgaggaaaattatcctccttcgaacacggaggaatctgcctaccaaacgatggccaactttataaaatgccagtacatcggggataagtttatcgctgatgtggttgaaagtctcattggaacttacctgagatggggtggttttaaaggcggcatcagaataatggaatggataggaataattcccaaaagtgaacgattagaatatatgtggcaacaaccatctccagatccattattactacccctgtcacaacatgagcttaatgaaaaaattcgccatcatctaccgctttgttcaaaaatcgaacaaatccttggatacaggttcaacaacaaggcctatcttttacaagcgttgacgcataactcttacacaccaaatagaacgacgctatcatatcaaaaactggagttccttggtgatgctgtgctcgattttcttattacgtgtcacatatacgaaacttgtgaaaacttagatcccggacagctgacagatttaaggtctgctttggtaaacaacaacacttttgctagtctttgtgtgaggttgcggttgcacacgtatctgctcatgatgaatatgcagctgcaaaaactaatagataggttcgataacttcatggcccaaaagaactatataatagatgatgaagttttgatattactccaggaggatgaataccaactggcagaatcggtagatgtacctaaggtacttggtgatattttcgaagcagtagctggtgctatttatttggacagtaaaaaatgtctgaaaacggtgtgggaagtgttttataagataatgtggaaagaaattagtttattttctagtaatattccgaaaaatgcgataagaaggctatttgaatggacttccgctcatcctaaattcggaaaaacggtacccacggaaaacaaaaaaactatgatacctttgcggtttcagttgaatggaattccaacggtggtccacggttttggaacaaatacggccatggccaaaaaagcagcagcaaaattggccttgcagttgcttttggagagaaaagacaagaaataattttacaaaaatttaaaatacacttcttcaagaaattaacgctccaccttaagaattggccatttttggtgtctcgaatttcctaaacct

SEQ ID NO: 19 - DNA, 3034 bp, Diabrotica virgifera virgifera
tttttcaccagattagtttattagttattcgatatttaagacatcgaaatgtctcaaagagcgacaagaacaaaaaagttctacctgtaaataacgaacaggaagattctgagtattctttgaggtttaggcctcctgtttacaaacaaagatatggagaagtgttcaaaactcttatagacagtagatggaggaccaaaattaatacattatgtgattttggttgtgcggagtttggaatcttcacttttttgaaacagttaaatagactaaacaatataatatttgttgatattgatgaagatacattattgttttacaaatctaaagtatatcctttaactatcgaatatttaagtagacgagaggaagccttaaatgtcagtatttttaagggtagtgtaggtgatcctgattatcatctgctaaatgtggatgttgtgactgccatagagctcattgaacatctctacccagataccttagatgcctttgcttataacgtatttagttacatacaaccaaagatagtgatggtgacaacaccaaatgcagattttaatgtattgtttggttgggaggacgagaacaaaacatttagacattatgatcataagtttgaatggacgaggcagcaatttcaggattggtcaaacaacatcatccttcgtttccctgactatacaatgtattttaccgatataggtgaagggcctgcagggaccgaagccttgggagcttgtagtcaaatggcaactttcgttagaaaagatttgtgcaatgaaagctatattttacaaaaatacacaaaactctgcatctgtgataatgaatctatgtgccaaaagaacactggaactggatctgtgatgagctgtaaatgtacctgtagcttatgttctccgagtttttcatggggaatttgcacgtattatagtttttcgataccagcgactgatagtgatagttttaaggatccctcatataatgtttattataagctgttagaccaaatcgaatatcctgtcgatcaagatagtcgaactgaggaagagaaaattctcgatgaatttagatatagaataaacattttaggccacatgaatgggagattcttcgttgaagagagagatcgatctgaaataccgataattgaacttttgtatggacctgaaggaacaaatataactgaaattgagctgtgtacgttattaaagagtgacggttatgaagtccaggattgcatagtccaagaaataggtgaatccgaaaaatgtgttatttacacaccaatattgatggataactgttcaacttcttcggaatctatagaaccagaaggcgattttcatacgtatattctacctccaggatcagattctgattgggatgaatctataaaggaggaaaccaacaacaaagatgtaaaggcaaaattaggcgaaacttctggacttaaagaggaaaatcactcagatgtgctaaccaacaatgtggtaccagaagaaagtcaccaacaactgcaagctgaagaatcccaaaataattgtgaatatcaagaagaaacagacatatttgacgatgcaataagttctactataccatcagacgaagataacaaattgcatttgaaaaaagctttagactttgaaacacactcattttcgagtgtaccaaacaatgtagataatgaaaaattggacaattttacaatcaatgaattagacaggtttcgtgatcttacgtcaaccaaaaatgccattggtcgtgtccttaagctccaccaaaggattcgtaagatgtttttcaaagaaatggacccagtcgcaggtccctccgctctaccccccctaaagaagagaaaaatgaagattcctatctcagacagtaagtatgaaccaaccctgatggacgatatgaaatcgttgacgaactgcattataaaaaatactttgaacgtgttaaacgtggatgatgacaggagtgttgtatttgctaatgttccaatgcatgggcctgtgtttactggcaatcctggtctgataccagaaattgacgaaagtcaaatgcaatatctggatgtggatggtattactgattctctcattgatgttagaggaaattcaaacatcaatggtattcgtccgagcaaatttatcatagaaaacaacataattaacttcaatcttcagttgcccccaaaaccctcaacaacttcatctcagccaataccgcctttagcatcttcggaaatgtcaatacctgaatttgctgacattcaagaacaaaacatacattcagaagataatgctatcgatcaaaatgattcggatattagttaccagtgtggctgtgacgaatattatgaagatgcagtaagtgaaggaagtatgacagcttcagtcgaccaatcaagcacagaggcagttgcagatccgaattccacaatagatctaacagtattcgacaccgatgttacgattcctgaagaaaatgcgccacatccagaaaactcaatgggtgcgaactacttgagttttgatgatttaatcgttgttgttcctattcttcttgatccgttggaaactcttgatttgggacagaatacgaatggatttcccgcttggctgcttgaaattctaaacactcaagtcagagaagaaaacttaccacctacaaatgatttagaagagcctcatttttattgtcaaggagacggattaggtgttcactcatctctactttcggtagaagtggacgagggagaagaagcatcgtctgaatctagcgacgaatccggagattacgccgaagtagatccaggtatatcgaccatggatatgagttcacttccagaagattcgcaaggacttactactgacaaccaagattctttagaagaagaaactgacaacagaattgctgcgaatagtcttccagcaataccacaaaacgaagttgaagcaatggattccgtatctaccaattcaaatatagaaactgaataaaaattacaataaatgttaaaaaaaaa

SEQ ID NO: 20 - DNA, 1052 bp, Diabrotica virgifera virgifera
accgtattgtttatttttatacaaaagaatctgaaaattgtaaatctacacaaaaatgtcaaatcatgtcaaaaccccggcgatggttcttcaagagctggcaataaagaaaggctttcaatcaccacattatgaaattactcatagtgtcaccggaactcataacaatagattcgattatagagtaagagtagccggagtggaagcaactggtactggttgctcaaagcagattagtaaacatgatgctgcatacaatgcattaaagctgctagaagaggacggcatttatgatccaaaagaaattcccatgagggaatttaaggcatctattatacaaaaacaatgtgaattagatgctggtgcagctataccttcatctgttaacttcgtagctcctttaaaagacatttgtgctgaaaagaaaattcaagatccagtgtttaaggaactatcagatgttggtccgccacactgtagagaattcacttatgaatgtggcataggttctgtcaaaactgttgcgactagcacaacaaaaaagatggcgaaacaattagcagcaagagaaatgctggaaaagttaaacgatattctacaggatttattattagagtgtcctcgtgaggaagaggaatttgaacagttaccatctactatcagagatcgaatgtgtgcagaatcagcactgaatcaaaaaattctccatcgttacaataagttattcggacaagttataccgaataaaaaaggaaaactaaaggatttctcaacttgtttccgtgagttgctgaacaaatttgaaaaaaccagagacgattttgtcgaagatctctgtgagaagacagaagaatctctagtcagatttttaaacaagatggaactacagcatgatattattcccatacaagaaaaatctccaattattgtcactttatgtatcaatactgatgtatcatttactgcaatgggtgtaggtccggatttcgaagaggcaaaagaagacgcgctacagcaggcatttataatgttagattgttatattaaagaat

SEQ ID NO: 21 - DNA, 80 bp, Diabrotica virgifera virgifera
aggggctgtactctcagctcgcggagatcctcaaagagtgccccggtcagtactacaggtaccatggggactggaagagt

SEQ ID NO: 22 - DNA, 3564 bp, Diabrotica virgifera virgifera
actcccctttcctttcattcaaccaaatatccacgatgacgacccagcaaccgactccagctcctccgaaacgtggaattataaaacagattctttctggggattctgttataattcgagcaccatctggagcacctccacctgaaaaacagattaacttttcaagcattactgcaccaaaattagctagacgagctgcagaatctggagaaacaacaaaggatgaaccatgggcctgggaagcaagggaatttttgagaaagaaactcatcggggccgactcccctttcctttcattcaaccaaatatccacgatgacgacccagcaaccgactccagctcctccgaaacgtggaattataaaacagattctttctggggattctgttataattcgagcaccatctggagcacctccacctgaaaaacagattaacttttcaagcattactgcaccaaaattagctagacgagctgcagaatctggagaaacaacaaaggatgaaccatgggcctgggaagcaagggaatttttgagaaagaaactcatcggggaagaggtattctttactagtgaaaaaccaccaaatgctgttcgtgaatatggagttgtttatttgggaaaagactttaatactgcagaaaacattacggaatccttggtatcagagggactagtcactgttagagaagcagtaagacctactccagaaataacccgcctgcttgaacttcaagatgctgccaaatcagctggaaaaggcatatggagtggcgctccgtcatctgatcacgtccgtgatatcaaatggactattgaaaaatccaaagaattggtagatcaactccaattcaagccagtaaaagcagttattgaacacgtacgagatggatccacagtaagagctttcttgttaccagacttttactacgtgactcttatgctctctggaattaggtgtcctggtttcaaattagacgccaatggcaaaagagaccctaacgccaaagttgagttcgccgaagaagctcgttacttcgtggaagtccgtcttcttcaaagagatgtagaaatcgtccttgaagcagtcaataacaataatttcattggaaccgtaattcatccaaaaggaaatattgccgaactcttactcaaggaaggtttaggcaaatgtgttgattggtctatcatgctcatgaagagcaacccagacaaattgagagcagctgagaagcaagctaaagaaggtcgaaggaggttgtggaaagatttcgtaccgacggcacctaaaattaccggaaaagaaaaggaattctccgctacggttagcgaggtcaacaacggagatgcccttgtacttaagatggccaacggtgacagcaaaaagatctttttggccagtattcgtgcccccaaagagcctggccgtgccaacgacgacgagggaaaacccattccaagacctaagggtttccgtcccctctacgatatcccctacatgtttgaagccagagaatatttgagaaagaaactcattggcaaaaaggtgcatgtcgtcgttgattatatccaagaagctagagatggcttcccagaaaaagtttgtgctaccgttaccgtcggaggaaaaaatgtcgcagaagctctagtttccaaaggtcttgcaactgttgttaagtatcgccaggacgatgaccaacgtagttgtcgctatgatgaactcctaactgcagagactaaggctaacaaatctcaagtcggtgttcactccaagaaagatgctcctccactaagagttaccgaaattgatgctgctagagcaaaattggaacttcctgccttacagagagctcaaaggatagatggaatcgtcgaatttgttgccagcggatctagattgagattatacattccaaaatcaaacagcttatgcactttcttgttgggtggtatcaactgcccgagagcaacccgccaagccaccgacacccccggagaaccctacggagacgaagcgctcctcttcactaaagaaagatgcatgcaacgggaagtatccatccaagtcgacactcatgacaaagcaggcaattttattggttggttgtgggtagataatgtgaatatgtctgtggcactcgttaaagaaggttttgcttcggttcatttcacaggagaaaaatcccaatacgcgtctctattgaaaagtgcagaagacagtgcaaaatctgaaaaattaagaatatggaaaaattatgtcgaagaagaaaaggaagaaaaacacgaagaggaaaaagtacctgtcgaacgtcaagtgaactttgaggaagtcgtagtgacagaggtgacgcccgaaggtagtttctacattcaaaagatttcagaaggaccaaaagctgaagctctgttcgccaaactgcgacaagaattccaagccaacccgcctcttcccggtgcttttacaccgaaacgtggtgatatctgtgctgccaaattcacagtcgacgatgagtggtacagggtgaaggttgaaaaagtacaaggaggaaaagcttctgttcattacatcgactacggtaacaaagaaactcttccaaccacccgcctagccagtttacccgccgcctacgtaagtgagagacccttcgcaacagaatacgtccttcccttcatcgtcctgcccaaagacgaagaattctcttcgttggctatcaaataccttaaagaagataccgccgttagcaagctatacatgaatgtagaatacagacaacccggatcccctgcagcagcttctttacattctgacaagacgtctgatgccgacattgtaaaaaatctcgtcaaagagggattacttatcgtcgacaacatcaaaggaaggcgtaacaataaattgttggaaagttaccgagaagctcaggaaacggccaagaaacaacacgctaatatttgggaatatggtgacatcacagaagtcgatgctaaggaatttggacttggcgtttaaactagggaatagggaccagtctaccagagcaaaccatctacattgtaggttcatagacttccaaatcatattgattaaaatgaaacaacttccacatttatagtaatagacataatatttataattgatttccgatatttatacatgagaaatatgtttttaggtgttatttgttgttttatatttttattatgtgcaaattttaattattatatttatatactgggtctctttattctaagtcatttttttgtaattttttccgacacgattgtttttatgatatatttattttgaattcaatttatctatttacatatttctgttgaatattaatttttgtgatgaattctaaaggtgttcacacacttccactctgtaaaagacatgaaataatattaaactagactgatacgccagtaaaggaaatatttagtcctctgaattgttatatatttatgtacgtactgcaattattcatatttcgggaaagcgataatgtaggggatgggctctgtttacaaataaattactttgatcgttaaaaaaaaaa

SEQ ID NO: 23 - DNA, 2592 bp, Diabrotica virgifera virgifera
agaaaagtcgcctgctattacctcgtgcgaccgcgaccggccatattgtagtgaatgattgactgagtgacgtacggctaaagtagccataaataaatcttccaacatctgaaagttgcgaagagctttccaataattaaccatcatggaaaatacgtatggaattggcattgccaataggtacgctctttttttggatgatgaatccgatccattggaaacgcttactttaaaagagcaggaaaaagaactgaaaaagaaaagcaaagtggccgagaaagaaaacaaagtgaaaacaccgaccataccaaagggaaaaccgaccccagctcaaaaaaaaccggttaaagatgtaaatcataagccccaggaaaataaacgcgacgaaactaaacctgccccaagaaacaatgttgacggaaaaccagaacggtcctttaatagattcaataatgaaaatcgtgaagaaagaaataataggcgaaaccgtgaggatagaccatataatggaccatctgaaaatagggatcgtgaagaaaggcctaggagagaacctgcgactggagattttgaaaaccgcaacaatcgtgatcgaggagaacgacgtgaaggacgtgagggacgcgcaattggaaacagacccggagcaccacgtggccaacgtaggaattttgatggagacaggcgaggcaaaagggaattcgataggcaaagcggatcagacaagacggaagcagacaggcgaggcaaaagggaattcgataggcaaagcggatcagacaagacggaagcagacaggcgaggcaaaagggaattcgataggcaaagcggatcagacaagacaggagttaagccgatcgacaagcgtgacggagctggggcacacaattggggatctcacaaggatgttattgaggaagcagacaggcctaataccgatgctaacgaaagttggggagacgaagttaaaattgaacctattgaaacggaaaagaaagaggaaggaagaccagaggaaggaagaggaggagaggaacagacaccagtagaagaagaaccaaaagaattgaccctagatgaatggaaggctcaacgcgctggacgtgctaaaccccaattcaatattaggaaagctggtgaaggagaggacccaagccaatggaaaaaaatgtttgaacttaggaaaaaagaaaaggatgaggaaactgatgaagaagaatatgatgtctcagaatatccccaacgtgttggtagacaaaagcatctcttggacatcgagattcaattcaatgacagtgtacgcagaggtggtggacgcggaagaggacaaagatctgggggcccaagaggtggtggaaatcgcggtggtggtactggtggtagtggtggcggcggtggcaatcgagctagagaaagtgatagagatagaccagaaagacgttaccataatgatgctgttgatgagagaaacgatgcccgccaagctcctaaggtagatgacgaacgtgatttcccctctcttggctaatggttagcccccagacagtcgttcactaagtattatcagctattttagtggattactacaatggggcgactatcatcacaataaaactgtatattattacaatttaactactttgttatgtcggattccgacataaacaggtctttagaatttcttagcaagtttttcaaatattctataggaatttctttcgaaaatatctcattttgagctattgcaacacgtggactgccgcgcctttgacgccataatataaacaaaagtacagcagacaccgtttctaatgcggtatttttttgaggaataaactatattcagtgtagactggaacactctgaaaggtggtgactactagtcagtgttatgctgtattgttaaacagtttcaattgtcgctgatgctcatgttaacatttgttcatgatgccatttttcaatttgcattttttattacgaagttttaattatttagttataggtttaaaaaaatcgacaggaaaaatttggacatggatgatagtaacgccagtctcgatatattcatattataattaatttatcatattgtaaatgtattttttgggttgctttgtcgcttttctgtatccttaaatatagcatcagctgtatcattttgtcaatgtattgctgtcattaattcaatgagaggaagagtactcattatatcagttcagaaaggcttggaccattttgctcaaggggatattcatgtaccaatcgaacaaaaacctagagttattcattttacagtacgggtatacaagaattaatacaaaatgcaaaaggttaagtgtacaattttttcggataggatataccggatatcctacaaaagacagacaccttccaaagcatttaacgaatcgggcctaagtggatgtgatatctgtaggtttgagtcaacgtttctgacttacgaaatgcttcagtcgaaactgctgtatctatcttcctctttaccaactatttataatcccatcctatttgctcgcattgatcatgtacatacacagggccgctgtatccattaggcaatataggcag

SEQ ID NO: 24 - DNA, 3194 bp, Diabrotica virgifera virgifera
gaaaagtcgcctgctattacctcgtgcgaccgcgaccggccatattgtagtgaatgattgactgagtgacgtacggctaaagtagccataaataaatcttccaacatctgaaagttgcgaagagctttccaataattaaccatcatggaaaatacgtatggaattggcattgccaataggtacgctctttttttggatgatgaatccgatccattggaaacgcttactttaaaagagcaggaaaaagaactgaaaaagaaaagcaaagtggccgagaaagaaaacaaagtgaaaacaccgaccataccaaagggaaaaccgaccccagctcaaaaaaaaccggttaaagatgtaaatcataagccccaggaaaataaacgcgacgaaactaaacctgccccaagaaacaatgttgacggaaaaccagaacggtcctttaatagattcaataatgaaaatcgtgaagaaagaaataataggcgaaaccgtgaggatagaccatataatggaccatctgaaaatagggatcgtgaagaaaggcctaggagagaacctgcgactggagattttgaaaaccgcaacaatcgtgatcgaggagaacgacgtgaaggacgtgagggacgcgcaattggaaacagacccggagcaccacgtggccaacgtaggaattttgatggagacaggcgaggcaaaagggaattcgataggcaaagcggatcagacaagacaggagttaagccgatcgacaagcgtgacggagctggggcacacaattggggatctcacaaggatgttattgaggaagcagacaggcctaataccgatgctaacgaaagttggggagacgaagttaaaattgaacctattgaaacggaaaagaaagaggaaggaagaccagaggaaggaagaggaggagaggaacagacaccagtagaagaagaaccaaaagaattgaccctagatgaatggaaggctcaacgcgctggacgtgctaaaccccaattcaatattaggaaagctggtgaaggagaggacccaagccaatggaaaaaaatgtttgaacttaggaaaaaagaaaaggatgaggaaactgatgaagaagaatatgatgtctcagaatatccccaacgtgttggtagacaaaagcatctcttggacatcgagattcaattcaatgacagtgtacgcagaggtggtggacgcggaagaggacaaagatctgggggcccaagaggtggtggaaatcgcggtggtggtactggtggacgcggaagaggacaaagatctgggggcccaagaggtggtggaaatcgcggtggtggtactggtggtagtggtggcggcggtggcaatcgagctagagaaagtgatagagatagaccagaaagacgttaccataatgatgctgttgatgagagaaacgatgcccgccaagctcctaaggtagatgacgaacgtgatttcccctctcttggctaatggttagcccccagacagtcgttcactaagtattatcagctattttagtggattactacaatggggcgactatcatcacaataaaactgtatattattacaatttaactactttgttatgtcggattccgacataaacaggtctttagaatttcttagcaagtttttcaaatattctataggaatttctttcgaaaatatctcattttgagctattgcaacacgtggactgccgcgcctttgacgccataatataaacaaaagtacagcagacaccgtttctaatgcggtatttttttgaggaataaactatattcagtgtagactggaacactctgaaaggtggtgactactagtcagtgttatgctgtattgttaaacagtttcaattgtcgctgatgctcatgttaacatttgttcatgatgccatttttcaatttgcattttttattacgaagttttaattatttagttataggtttaaaaaaatcgacaggaaaaatttggacatggatgatagtaacgccagtctcgatatattcatattataattaatttatcatattgtaaatgtattttttgggttgctttgtcgcttttctgtatccttaaatatagcatcagctgtatcattttgtcaatgtattgctgtcattaattcaatgagaggaagagtactcattatatcagttcagaaaggcttggaccattttgctcaaggggatattcatgtaccaatcgaacaaaaacctagagttattcattttacagtacgggtatacaagaattaatacaaaatgcaaaaggttaagtgtacaattttttcggataggatataccggatatcctacaaaagacagacaccttccaaagcatttaacgaatcgggcctaagtggatgtgatatctgtaggtttgagtcaacgtttctgacttacgaaatgcttcagtcgaaactgctgtatctatcttcctctttaccaactatttataatcccatcctatttgctcgcattgatcatgtacatacacagggccgctgtatccattaggcaatataggcagttgcctagggcggcaaattatgagagggcggcaaaagcaaaaatacgcaaaaatggtacatgtttgaagggcggctactagagaattacctagggcgtcaattcacctaaatgcggctctgtacatacatacatacttacataatcgatgttcctcttataccggaaggtgtcgaggattgatcatgtttttgacataattttcaacaaaaagaacaacacgaattatgcaaggaaagaataacacaaaaataaaatattaatcagttgcaaaagtacgagagtattgaaaagcgacaacgttcgtatcgacaatagtttattttttgttaaaagcttttttaattatagacttgtaattaattgtattttatagctattggctcatgttgctggtattacgaaccaattgtattgccagtaacatgttaattttgaaagataacacaaaaatggactccgatctgtgaaatgaacaatttctgtccttatggtgacatatgttcactttcgcagaaactggaaaggtgtgtgttgcgggcaggcgcatccgtttagttttactgaagttgtctgccaaattaacactttcagctctgggccaatatcagatattggtctcatgtgccacttttatacagtcattggaaaa

SEQ ID NO: 25 - DNA, 2970 bp, Diabrotica virgifera virgifera
atgagcgcacgagagttcattttgtagttatttgcattggtgtttcaaaaatttgtgcaagcaaggcatttattttatgtttataattgtacgagtacagaccaaacaaacaattttaatattgtaacaaatacttaaaacagctagagatgaatagaccgccgccgagaggacgtggggcccttatggccgcacttaaacttcaaaaagagaaggaagctgaaaaacctgtaggcattgaaccagaacctccaaagccaacacaagctaggggccgttctgccagtcttttaaaacttttagctgccaagccaggaccttcagtagaaactacaactgatgtaaataaacctacatcaagtggttcaacttccagtgttccagtgtcttcagatgaaccaactaagacagtgtccgcagatgaaccaactaaagctgatgttccagtatccccatctaaaagcagtgtagaggagatcacaagatccacatctcaaatgtcctttgttgagaaggaacctgtgtattttcaaggtgagagtggtaaacccctgcgcctatctgtcaattacattaaattagaattggcacaagatagaggagtttatgaatacgaaatcaaattcaatcccgaattagatgctaagaataagaggttcagagctgctaatcaagttataaaacaacttggcatggctaaagtatttgatggaggcaacaccctgtatcttccacaacaaataacgagcacatctcaaacttttactgtagacgatgaggagaaaaccatttccgtgaaattaatttataaaaaaaagaaaaatatggcggattatgactgccttcatttatataatgttttatttaaacgcattatgaacaaattaaaatatacagctattggtaaaaactactttgacactaatagcaaacatttggttcctcaacataaattggaaatctacccaggttttgctattgccgtcgatcaacaagaggatggcttgatgctgtgtctagatccgcagcatagagttttaagaactcagaatgcgaacgaactccttcgcgaactaaggtcccaacatcgagatattcaaacctaccaaaaagtggccactgaatatgtaataggatgctgtgtttttaccaaatacaacaataagaactacattgtagacgatattatttgggatcaatctccacaaaatacctttcctacaagagacggaaaccatatatcttatatcgaatattataagcagcaatataatattactatacaggactacgatcaacccctgttaattaacaaaaaagaggtgccggtacagggatccgaacagaaagttgaaagagtggtttgcctcattcccgaaattacgcatcttaccggactcacagataacatgaggagtgattttaaggttatgaaagatgtcgctcaatttactcgagtgacaccgaatcagagggtagctgcattaagaaagtatttacagaatataaataacaacgaagaagcgaaacaaattttagctgattggggactgaaaatagcaaacgataccttaaacctgggtggtcgaaaattagacaatgaaataatatatttcggacaaggtcaacagtttcaaacgaacaataacgctgattggacgcgaccgtcgggagaaaatcaggtgacaggaccggttgatatgtacaattggatagtgtttcatacagaccgagacagaaagtatgcgtatgactttggtgagttaatgtgtaagctaggaaatgtaatggggtgtcacattagtaagccgaaaatggttaaacttccgggcgatacaaacgaaaattacatacaagcctgccagcaatatattgataaaaatgttcagattgtagtattcatttgtccaaccatgcggtcagatcggtatggacacatcaagaagatgtgctgttcacagataccagtaccttcgcaagtcatcaattctagaacactttcaaatccgggcaaggtcaggtctatagtgcaaaaaatcgcacttcagatgacctgtaaattgggaggaactctgtggacagtacgattcccattcaagggttggatgatctgcggaatcgacgtctatcacgggaagaagtccagctcagtatgtggattcgtttcgagtcttaatgaatccgtatcaaggtggttcagcactgcaacgttccaggcaggggaacttggagattttatgaaaacagcatttataaaagcattagaagcaacgcgaaatgcaaatggctactaccctaaaaaagttgtaatagttagagacggtgtaggcgatggacaactaacccactgccaaagatatgaggttaagcagttagaaagctgtttaaaggaattagagttggatataaaaatatgttttgtggttgtacaaaagagaataagcaccaggatattttcacaaggccacgatggtgcagataatcctccctgcggtacaatactggaccattcaataacaaggcgacaattaccagactttttcctagtgccacaaagtgttagacagggtaccgtaaatcctacacattatattgttcttcacgatacatgtgggctaaaacctgatcacatacaaagactgtgctataaactttgccatttgtattacaactggcctggtacgattagagtaccagctccgtgtatgtacgcccataagttagcatcattagtgggacagcacctcaagaaactgcccagcgctgcgctggcagataaattgttttatctgtagacatatcgtttgttaaaaattatgttctctacggtacctgctaccaaaagagtgattatgcgcacagactgtgtacactcttccaattatgttacaactcgactggtacgataaaggtgcgtgtccatgagttggtgctccgtgctcgatgtagctgctcaaatggatacgcatg

SEQ ID NO: 26 - DNA, 1971 bp, Diabrotica virgifera virgifera
acattttcctttaattcttactagttttaaaaaagagaatggctgaagaagtattaaatggagatgataaaaagaaaaggatgtctgttgggctctacacgagctgtcccccaagtataaaacaaggtgtcgactctgcttttgaacagggataccactttgtagtcacacaacttacacatccaagttataccagaaacttgaataacaatagtcctagtgtcataggaagaacagacagagtaatgaggagttctgattggggcagattagtggttggacaattaacccctactattgacttggacagtgaggtagaacacattcgagaacatagcaaaatgatattcgaagaagaattggggttcgcatctcacctaggtgttccagcaatctggttgacccttaccaaaccagataacgtacaattagctcgtgttctacattcaaaattagtctcaggatttaactatagtgtatgggtaaacattccaatgacccacccttccaggtacagtcccgttgcagaaacggaatatgatacttgggattggtggaataaattccatacttactgtaattatgataaaagactaggtttagttcttgatttaagtgatactaagcacttacttccggaaaatgagctgaaaagatggattggggagcctatcagagcgattgtgatacctacatcacactttttaacgaatcaacatggaaaacctgtcctctcgaaagttcatcaagaaattattaaaaaattcatgagtctggacgttcagtatgtaattaaaaatgatactgatagtgacttatctctttacaatagatatataagcttcttgggcaaaaagctttacgtatatgatacagtgaccgattttgttgatggatttgaagattttctccagaaccctctgcagccacttaccgaacacttagaaacaactatttatgaaatcttcgaaaaagataatattaaatatacatcttacgaaaacgctgtttataaagctattgaaatttttccaaaagatgagacaccagttgtaatggtagtcggagcaggaaggggtcctttggtacaggctgttattaatgtatcgctagctttagatagaaaaattaaggtctacgcagttgaaaaaaatccttttgcagttaatacattagtgcatcgtaataaggatgaatgggataatgacgttactattgtcaatagtgatatgaggacatacaaaccgccggaactagctgatatattagtatctgaattgttgggttcttttggagacaacgagttatcccctgaatgtctagatggagctcaaaggttcctaaagaagtcaggtatatctatacctcagtcttatacttcttatatagcaccactacagagtactaaaatttataatgagatacgaacaaatcgtcaagtggataaaactctacagttctgttatgaaacaccttacgtcacacatttggctaacttttatgaaattgcatcacctcaagctcttttcacgtttaagcatcctaattggagtgaacatataaataatcagaggtacaagaaactgaaatttcaagcggaactgtcatgtcttttgactggattcgtaggatattttgatacagttctttataaagatgtgatgctgagcatacatccagagacacacacgccaagtatggtcagttggtttcccattgtatttcctctagaaaatcctgtttacgcatacatccagagacacacacgccaagtatggttagttggtttccaattgtatttccattagagaatcctgtttatgtggaagaaggacagagtattgaagtggctttttggagggcagaatctagtgataaagtgtggtatgagtggtgcttgataagtccagttaacagtggaattatcaatccaaacgggagatctttttttatgaggaagtattgatactg

SEQ ID NO: 27 - DNA, 5431 bp, Diabrotica virgifera virgifera
gtttccagcctctgccatgtgtcacataacatcaatatatctacatcatacgttattggtatatatcattggtaatacgaataacgtatgacgtagatatattaattttatgtgacatgacagaggctcgaaacaaatgacatgtgaatgaaagccccattgttgtacagccttgattcactgtatcgttctgaagttaatttcttatggtaccttaatacaatttactatttttactgggtataagccacaattttatttaaaacaagtttattttgacgtttcataagcaaaattatggcatattcccagtaaatttattaaatcgattcaatgtatattcttttggtgttagttgtaaagagtctgaaagattatcacttattaaaattatatatcttgacctcagaggtaaactacaccatgtcatttcaagcaactgtgtttagcatgtgtttgcaacaaagtttagagcacttagaaagttataaaaagctgatatataccataattgtttgaaagacaatatgaccatattttaatgataatataatatatcgtcggtaatgtgacaatacctcctatctggtttttcatgaatattgtaagagggatttcaaactttttttagggtcacatcctgttttcttatgttttgacttgttttgtagtaaataaatagttgaatttactacaaaacaactcaaaaaatatcatatggaaaataggagatgaccctaaattcatgaaagagcagataggaggtattgtcacatcacggacgatataaccaatttgtataatccaactaataaaataggtggattaaaggatcttaggaatagtcatatttgggaaattatgaattcttcttcactagttaatctgatgtgtctagtgtcttatacaattagattctacgaacatctacccaaaaaagtatattcaaaaaaaaaattatatataacatactatgtactaagactataactactatatataatcataatccctcctactgtaaggtgtaaggagactaactactataagtcataaaaaagacctttcggaattcttctacaatttgaattttataattaataaggtattatcaaaatagaaagtaaaatagttaattactacagttatgaatcatatttcatcaccattttgatgtttagttgtaatagttatttcaacagtggtaataaaaacttcgaaaagctgtagtgaaaaactgtcatttttgacttatactcttaatacgtggcatgatcgatatataatgtattaattcaaatttatttgtagaatgtgattctacaaattgggttaaccaaatgtatatttcattaataaaatcaagctcaaattttaatacattttgttgacatttgttttatacaaattattgatttatgcatatatctgaaaaaagattttgtggtgataataccacattatttatgaaaaaatgtaactttaagactccttagcaaagacctgacaaaatatatatttttgccagggatattttctgaagttgaggtaataatttgtaaataatgtagtatttcaaattagttaattttatagattttcaatatattgctcatctggaagaagagagtcacaactcaaaaaacagcttttttcaggaaacgcagttagtatacgcacatgaaaaaatggcacatacaaagcaaacagcccgaaaatccactagtggtaaagcaccacacaaacagttggcaactaaagctgctcgtaagagtgcacctgccactggaggagttaaaaaacctcatcgttacaggccagataccgtagcccttcgtgaaattagacgctaccagaaaagtacttattagaaaactacctttccaacgtcttatccgtgaaattgctcaagattttaagacagatttacagattttatatttggtaggtttatttgaagataccaacttatgtgctattcatgctaagacagtcactattatggctaaagacattcagctggtcagaagaatcagaggagaaagggcataaacaaagaaaagactttaaaaaatatattttagaacttaatttaaatgttgactgtctttctattagcaatcaagaaaactatatatttgatttaacaaataaaaacgatcaaaattttgagttgtcacttttcttttaaaatatgtcgcttttttaaacattaatgcaaaatacctaggagatttctcaaaatacatacaagggttttctcaactatatgttaatgtagaacgccagaatataactgaaaactgtcattgtttcggaataaaatattgattttactgccaaaagaataatgacactaccgccatcttgcaatgtgaaacttcttggtaaaagtatacgacttttggagtcatttaacaagataactggaattatgcatttcgtcagtctaaatcgcaaattgcctaagtcacaaattgaaaattttagaggagagacaaaaaaagtgtggagtttgcctatgtcctatgagtaaaataactttcgtttaccgaaattgccgtgaaataaaataataattgcgcttgtgggaattgtcaggcagtagcttttaccgtctactactagatgaaaccaaaaaacaattttcacaaaaaatggacttgggcaatttgcgatttagaccgacgatgtgtctgtaatttggttgatacatctcattagggtcctcctcatgatcttctagctttccttgtataacaagtattcatgttttctgtgtttactctcataacatgttcaaaatattttaatggttggggatggacttctgaacgctacattctgggaaggctcggttggtcgtccaagaaagagatggaaggacgcagtagccagtgatctatgcaaaatgggagtacagcaaaagtgtctgcatatacaatcgtggctgagaatgtgttaagaaattattaccaagcagcttatttgtgttgacttattggttgaataattataaccaaatgttgttattgcctataaatgcttcccaaattaattgtgttaacctattagatctaaattaagcattttgttccagatgcctgaagaaactcaaagcgcagatgtcgagaccttcgccttccaggctgaaatcgctcagctgatgagtttgatcatcaacacattctactctaataaagaaatcttccttagagagttgatctcaaactcctcagatgccttggataagatccgttaccaatcactcacaaatccatcctgtctcgactctggaaaagatttgcacattaaaattgttccaaacaagagtgaaggaaccttaaccatcattgatactggtattggtatgacgaaagcagatttagttaacaaccttggtacaatcgcaaaatcaggaacaaaggcattcatggaggccctccaagctggagctgatattagtatgattggtcaatttggtgtaggtttctactcagcctacttagttgctgatcgagtagtggttgtatcaaaaaataacgatgatgaacagtacatttgggaatcatctgcaggaggtagcttcacaataagaccagatgttggagaaccattgggacgtggtacaaaaattgttctgtacatcaaagaggatcaaactgaatttttagaagagaataaaattaaggagattgtaaagaaacactcccagttcattggttaccccattaaattgcttgtagaaaaagaaagggaaaaggaactaagtgatgatgaagcagaagaagaaaagaaggaagaagaggaagacaaagataaacctaaaattgaagatgtaggagaggatgaagatgaagataaaaaagatgagaaaaagaaaaagaaaaaaactattaaagaaaagtacactgaagatgaggaactaaacaaaaccaaaccaatctggacaagaaatgctgatgatataacccaagaagaatatggtgaattttacaaatcattgacaaatgattgggaagaccatttagcagtaaaacattttagtgttgagggtcaacttgagtttagagctttattgtttgttcctcgtcgtgtaccttttgatttgtttgaaaacaagaagaagaagaacaacatcaaattatatgtacgcagagttttcattatggacaactgtgaagaccttatcccagaatatcttaactttattaagggagtagtagactctgaagatttacctctaaacatttcaagagaaatgttgcaacaaaataagattcttaaggtcatccgcaaaaatttagttaaaaaatgtctggaactttttgaagagcttactgaggacaaagatggatggaagaaattctatgaacaattctcgaagaacatcaaattaggaattcacgaagattcacaaaacagagccaaacttgctgacttattgcgttaccacacctctgccagtggagatgaagcttgttcactaaaagactatgtcagcagaatgaaggaaaaccaaaaacacatctactatatcactggcgagaacaaagaacaagtagcacattctgcatttgttgaacgtgttaagaagcgtggttttgaagtagtatacatgactgaacccattgatgaatatgtagttcaacaactcaaggaatatgatggtaaaactcttgtctctgtcaccaaggaaggtctcgaattacctgaagatgaagaagagaagaagaaacgtgaagatgataaggccaaatatgaaggtctttgcaaagttatgaagagcatccttgataacaaagttgaaaaggttgtggtatctaaccgtttagtagaatctccatgctgtattgtaacctcacaatatggatggactgctaacatggaacgtatcatgaaagcccaagctctccgtgacacatcaactatgggttacatggcagccaagaaacacctagaaatcaaccctgaccattccatcattgaaaaccttagacagaagacagaagttgataaaaatgataaggctgtgaaagatcttgtcatcttgctcttcgagactgccctccttagctctggttttactttggatgaacctcaagtacacgcatctagaatctacagaatgatcaaacttggtttgggcattgatgaagaagaatctatgcttactgaagaaaccccatctggcgaagctcctgctgccgaggctggtgatggagaagatgcttcccgtatggaagaagtagattaaatgcattcatttaaagagcatgtgttgtaatatgttcaaatgacaatttctctcattccttatttttgtaaataatttatttcttttttatacagagtattactagcatttgaaaggctactggaatagtctggctgtgtagagtactaatgaccaattgtcgatcaacaactg

SEQ ID NO: 28 - DNA, 2556 bp, Diabrotica virgifera virgifera
aaaatttacgctgagaaagcgaacgtcacttgcggaagcgaatttccaaagcagaaaattatttcaaagcggtttttacattgtgacttgtggatattttgtgaaaaaactagtccaaaatgcctgaagaaactcaaagcgcagatgtcgagaccttcgccttccaggctgaaatcgctcagctgatgagtttgatcatcaacacattctactctaataaagaaatcttccttagagagttgatctcaaactcctcagatgccttggataagatccgttaccaatcactcacaaatccatcctgtctcgactctggaaaagatttgcacattaaaattgttccaaacaagagtgaaggaaccttaaccatcattgatactggtattggtatgacgaaagcagatttagttaacaaccttggtacaatcgcaaaatcaggaacaaaggcattcatggaggccctccaagctggagctgatattagtatgattggtcaatttggtgtaggtttctactcagcctacttagttgctgatcgagtagtggttgtatcaaaaaataacgatgatgaacagtacatttgggaatcatctgcaggaggtagcttcacaataagaccagatgttggagaaccattgggacgtggtacaaaaattgttctgtacatcaaagaggatcaaactgaatttttagaagagaataaaattaaggagattgtaaagaaacactcccagttcattggttaccccattaaattgcttgtagaaaaagaaagggaaaaggaactaagtgatgatgaagcagaagaagaaaagaaggaagaagaggaagacaaagataaacctaaaattgaagatgtaggagaggatgaagatgaagataaaaaagatgagaaaaagaaaaagaaaaaaactattaaagaaaagtacactgaagatgaggaactaaacaaaaccaaaccaatctggacaagaaatgctgatgatataacccaagaagaatatggtgaattttacaaaaccaaaccaatctggacaagaaatgctgatgatataacccaagaagaatatggtgaattttacaaatcattgacaaatgattgggaagaccatttagcagtaaaacattttagtgttgagggtcaacttgagtttagagctttattgtttgttcctcgtcgtgtaccttttgatttgtttgaaaacaagaagaagaagaacaacatcaaattatatgtacgcagagttttcattatggacaactgtgaagaccttatcccagaatatcttaactttattaagggagtagtagactctgaagatttacctctaaacatttcaagagaaatgttgcaacaaaataagattcttaaggtcatccgcaaaaatttagttaaaaaatgtctggaactttttgaagagcttactgaggacaaagatggatggaagaaattctatgaacaattctcgaagaacatcaaattaggaattcacgaagattcacaaaacagagccaaacttgctgacttattgcgttaccacacctctgccagtggagatgaagcttgttcactaaaagactatgtcagcagaatgaaggaaaaccaaaaacacatctactatatcactggcgagaacaaagaacaagtagcacattctgcatttgttgaacgtgttaagaagcgtggttttgaagtagtatacatgactgaacccattgatgaatatgtagttcaacaactcaaggaatatgatggtaaaactcttgtctctgtcaccaaggaaggtctcgaattacctgaagatgaagaagagaagaagaaacgtgaagatgataaggccaaatatgaaggtctttgcaaagttatgaagagcatccttgataacaaagttgaaaaggttgtggtatctaaccgtttagtagaatctccatgctgtattgtaacctcacaatatggatggactgctaacatggaacgtatcatgaaagcccaagctctccgtgacacatcaactatgggttacatggcagccaagaaacacctagaaatcaaccctgaccattccatcattgaaaaccttagacagaagacagaagttgataaaaatgataaggctgtgaaagatcttgtcatcttgctcttcgagactgccctccttagctctggttttactttggatgaacctcaagtacacgcatctagaatctacagaatgatcaaacttggtttgggcattgatgaagaagaatctatgcttactgaagaaaccccatctggcgaagctcctgctgccgaggctggtgatggagaagatgcttcccgtatggaagaagtagattaaatgcattcgtttaaagagcatgtgttgtaatatgttcaaatgacaatttctctcattccttatttttgtaaataatttatttcttttttatacagagtattactagcatttgaaaggctactggaatagtctggctgtgtagagtactaatgaccaattgtcgatcaacaactgtactgattttccgttaataaaccaaataattgaaaaaaaa

SEQ ID NO: 29 - DNA, 2838 bp, Diabrotica virgifera virgifera
attatcccagaactatttatttcatcttcttgacaactttgtaattttgtactttcccgccaaacataaatctcttccagccaataccaggcagccatatggacatgagtttgtctgtagactttttattggttcacgtcctgtgacacttatcgtgtagtttttctggtgaattcaatttctcccatcatctaccaaaaacaccgagccggtatttgtaatattttttgcttgatgaactaaaatttaaaaacagggctgcaaaatgaagcagtttttattattaactattggtttatttgtcttaattggtactgtaaggggcgatgaaatcggagaaccatctgtagaaaccatagatttagatattggagctagcagagaaggatctcgaacagatgatgaagtcgttaaaagagaagaagaggcaatcaaattggatggactcaatgttgcccaacttaaggagttacgagaaaagtctgaaaaatttgcttttcagactgaagtcaacagaatgatgaagttaattatcaattctttatatagaaacaaagaaattttccttagagagttgatttccaatgcttctgatgcattggacaaaattagaatgctgtcattaacagagaagagtgtactggatagccaaccagagatgaatattcgaataaaagcagataaagaatctggcatgttgcacataacagacactggtataggaatgactaaacaagatctcgttaataatttaggaactattgccaaatctggtacagcagaatttttaagtaaaatgcaaaatgctgatacttcacaagatatgaatgacatgatcggccagtttggtgttggattttactcggccttcttggttgctgatagagttatcgtcagcagtaaacataatgaagacaaacaatacatttgggaatcggattcagcatccttcagcatcgtagatgatccaagaggagacactttaaaaaggggaacaactgtaagtttggaactgaaaccagaagccagagatttcttggaccacgagaccgtccgaaatcttgttaaaaagtattcccaattcatcaatttcccaatttacttatggactagtcacactgaaacagttgaagaacctctagatgacgatgcttcagaagaaacatctccgtctgccgatgaagatgatgcggcagtagaagaagaaaaagaagaagataaacctaagactaaaaaagtggagaagaccgtttgggattgggagttgttgaatgacagcaaaccgatttggaccagaaaaccaactgaggttgaggatgcagaatataatgaattttatcaggcattgaccaaagacaccaaagatccacttaccaaaattcatttcgttgctgaaggagaagttacattcaaagctttgttatatattcctactgtgcaaccatcagaaagctttaataggtatggaactaaaactgacaatattaaattgtacgtccgtcgtgtatttatcactgatgaattcaacgatatgatgccatcttaccttagttttgttagagggatcgtagattctgatgatttaccattgaatgtatctcgggagacgctacaacaacacaaattaatcaaggtaattaagaaaaaattgattcggaaagtacttgacatgttgaaaaaacttcccgatgacgaatatgacaaattctggaaggaattttctaccaacattaaactgggagctatcgaagaccctgccaatcgcacaaggcttgccaaattgttgaaattcttgtcatccaacggaagcggtttaaccaacttgtcggattacgtaaagagaatgaaaccaaagcaagacaaaatattctatattgccgggtcatccaaagacgaagtttcaaagtcacccttcgttgaaaggttattacgtaaaggttacgaagtattgttcttggttgaagctgttgatgaatatgcaatctctgcaattcccgaattcgaaggcaagaagttccagaatgtagctaaagaaggtttcagtctaaccgaaaccgaaggaggtaaagaacaattggaacaattaaagaaaacgttcgaacctctcaccaaatggttagccgatgatgcattgaagaatgaagttgcaaaggccaccgtttccgaaagattgtctgactcaccttgcgctttggttgctagtctgttcggctggaccggaaatatggaaaggttggctttatccaacgctcatcaaaaatctgacgatccacaacgtacttactaccttaaccagaagaaaactttggaaattaatccgagacatcctttgatgaaagaacttcttaaacgagtacttgatgattccagtgacccaacagcgaaagatatggccaagatgatgttcagaacggccacgttgagatctggatatatgctccaggaaaccttagatttcgctgactctattgaagcgatgatgaggaaaacacttggagtgccattagacgaacaaattgaagaagaagaagatttacccgaagacggtatttcggaagaagcgatgaatgaaaaaattaacaatttgttaaatagtgtagatatgatggtaggaaaaactgatacagcggaatcgttttcaaagttcatctgtcatatgaaagaagtgctcgtccagcaactactagagaaaaacgtcacaccaaaacacgtaggagacactcccgtccgacaatccacgagttaccctcacaggataaaagaagtagctcctcgagaggcactcatcgaaaagtttaaacaaaccttggcgcaaaaaatggaagattcagacgaaag

SEQ ID NO: 30 - DNA, 3367 bp, Diabrotica virgifera virgifera
cgtgggcgcgccaatgatgaatgcggggttgttgtttgtatgtcaaaaaacagggttggcaaaaaccaaggttttttcgaaaaaaccaaaaaaaaacaggttttttttatacaaaatatagtaagtccaaaaactttaaaaatgaataaattattttataaaataatagtaataaatctaatgaacaatgaaaaaaaaaagattaagactacttttatttttatttacagacacacaaaattaatataacaaaaaacatcttcaaacgtaataatattcaaaataactaaatttgaaaatacaaaaatagaatttatttatctcaattttcttcatttactgcagatgtattaaaaactttaaataaacaacagtttggaggcttttgctgtacccaacctgtttcgacttcactagcccaaaggaataaaaaattattctttcaacgcttgccgaagacgcttgggttgtgtgaagttgttcaataatattaatgatgttagtgtgatgatattaatatttttgtggcttttctgccactcaatcggtgtcacttttgaagtaacactgttttcaaaaaaatatttttgaaaagctacactttttgcctgaaactttataattattagcaaaacgtcaatttcaggatacttttcttttgcaaagtccagtgctgttgatgtctcttcctgtgttaaatctaagtagggggatttttcccttgtgtcaagcatatatgataaaaatgtgcttatgttattgccatttcatacagacttttgaattttttttacactattcatttccaatatttctgaaattgttttcaagctcattccatgcatgtacaggatcactaatgtattactttgttttgaaaaaattagatttttttcttaaaaaaaccagttggtttaaacctgccaaccctgatgccatgcaagacggacttggatagccttgatgtaaagctgcttttaaaactgcttttcgataagttaagattttatggattatttgttattttattaacggcaacggcgcaagcaaggcgcaaggcaagtgtcaaaatcaatccaaaaattaaaataattcaaaaaatattttttggaataatgtctctaagtagatttagccggttacttgcttttagacatttaaggctagtaacaagaaatcacaactttacaaacattaactctggaagaatttcatcttgcggtaaccagaaccttagaagacttttaagcacacaaacgtcgcctaatgaagatgaacatcattcaattattaaagacacagagaaaccaacaggtgaaagtacaaaatatgaatttaaagctgaaaccaaaatgctcttggatatagtggccagatcattatattcagaaaaagaagtttttatacgagaactaatatccaatgctagtgatgcattggaaaagttcagatacttggcggtttcaggagacgagtctgccaaaaaaatacaagatgttgatcgaccattagaaatacatatatcaacagataaacaaaatcgaacaattacaatacaggatacaggtattggaatgacaaaggaggaccttatatcacatttgggtataatagccaagtcaggatctaaggcgtttattgaacaaatcaaagaaaaagctgctgcaggtgataataatattataggacaattcggtgttggtttctacagttcctttatggtagctgataaagtagatgtttattcaagagctgttggagaagaaactggatataaatggtcctctgatggaagcggtacttatgaaatacagcctgcagaaggtgtacaaaacggaaccaagattgttatccatttgaaagcagattgtagagaatttgcagatgacgatactattaagaatgtagtcaataagtacagcaacttcgtcggtagtcctttgtaccttaatggcaaaaaaacaaacattgtacagccactatggttatcagatgctaaaaatgtcacagcacaacagcataacgagttctatagatatataagtggcagttatgatgtacctagatatactttacattacaagactgatgtgcctctttctattagggctttgttatattttcctgaaggaaaacctggtttatttgaaatgtcgagggaaactgaatcaggaatcgcactatatactaaaaaaattctgattaagaacaggactgataatattttgccgaaatggttaaggttcgtaaaaggtgttgtagactcggaagatattccattaaatttaagtagagaacttttacaaaacagtgctctaattggcaaattacgtgacgttctaacagcaagagttttgaaattcctacaagaacagctgaaaaagaatccagaagagtacgaaaagttctacaaagattatggtttattcattaaagaaggtattataacaaattacaacatgactgaaaaggaaagtgctgcaaatttattattattcgaatcatctcatgaagctcctgaaaaaaaagtaaccttaaatgattatctggcaagagctacagataataggactatttattatttagcagccccaagccgaacgttagctgagaactctccttactatgaatctctgaaaagtagaaaacaagaagtgttgttctgctatgaaccttatgatgaactagtccttatgcaacttcagcaattcaagggtaacaaattggtttccgttgaaaaggatatgcgagaggataaaaatgctaatgatctaacaaatttaggagacgatagtttaaaacgtagtgaaattaacgacttgtcagcatggataaaagaaaagttaggtgataaagttgcagcagtaacagctaccagtcgtctagaaagtcatccatgtgttgttactgtagaagagatggcagctgctagacattttatcagaacacaaagtcacagcgtttcagaagacagaagatacgccattctacaacctaaatttgaaattaatccaaaacacccgattatcaagaaaatgtataccttgatgggcacaaatccagtactaggtgaattgttagcgaaacagttatttgcaaactccatggtaggagctggcctagtagaagatcctcgaaccctattgacatcaatgaatgatctactggtgaaagctctggagaaacattagactatttaaattaagatttttattacatttgctcattcctgtaaatatgttttttctgttataagattctcataatagcaaattaacagttaaatttgtttttgaagtcaactttccgataacttgtttgtaaaatattccattgtcaaaatataaagaattttttttaaaaaaaa

SEQ ID NO: 31 - DNA, 3227 bp, Diabrotica virgifera virgifera
cataaacaatcgtcttttaccgatcgatgttcgaatagaaaatccatccatataataagaatattgtgctctgctctgcctctgcactactctgcagtactgcaactgcagtttgtctcagataactgaactgattactgaagtgattatttcagctgtggtttaggtgcttagcaactatcaactatatttttatattacggtctgttctataataaaccagggagttagaattattattgttgtaagttgcttgctgatttaattatggcattatccgttttagaggactatgttaaagatcttttaaaagaaaatattatccaaaattatacggctcagaaagaaactgcacgtgagttttatttcgagaagtacagacaacgtggaaagctatcttttttcaaatttaagaaggagctatggaaatattggtatgtcaattcgtatacgtcgcaaacaattaaatttaacgaacaatggataaactattttgctgttcaactcggagaaaactctctgaataaggagccatttaatgagcaaacctatatcaatgaccagaattgttcattgtgcaatgttatatttaataatccagatgaatataaaagccatctggagtggatggatcatcaaattcgtttgagttacgttaaaaacaagtcaattttcaagaacaacaatgaaatcaaagcagtgttaatatgtaatgaagaagaatatacagagcaaaaactacaagttccagtgaaaacagatatgcaaaccacgctacgtatccaaaacgttacgaacaaaaaaattgagattctaaagattatccaaattaacactttacagaaacacgtgagccttcagaaagaatttgtgaaaggaatcccattggaaccatcggcaacagtagatatcactataagggcttatttcgaacacagcgaatcacttgtatatcccattttattacttactcggagaaagagaaaaagttttcatctaattacaatagaagtggagtcagtctctgaattttctttcctaaagtcaaattcgaaaaattatgttagtccaataccagatgcttattcaatatattctaatatgaaagataatattgtgccaggacaaaagctagaagagtttaaatcacactacactgagaagttaccattgaagcattttaaaatacccgataaattagaagagatatttaaaaaactattaacaagaaatccagaatttggtatgagagcacctacgcattacaaaaaatttagtcgggagttggattttactcccggcattgacgaaaccaactattttatcagccttgaaaaactattgcatattgaagaaaatcagttcagaatagatattagaaattatgataccacatctacattagagaaagtgaagggaaaatctttgtacaaactagaggttcctggattagccgaagcaagaccgtctattttaagaaatgataaaatttatctaaaagaaaataagactgattcctataagtatgagggacgtgttcatcagatatttgaaacaagcgttcatttaggattaaacaaaacgtttgacgaaatattcattaataacaaaaaatttcatatcgaatttggttttaacagaaggtcaatacgagtcgagaaacaagctctatttttagctcatacacatggaattattccatatttatttccaaaggaacttcgaattgaaatgttacctgaaaaggatttggtcttctccgataggaccttgaatgaagaacagaaagttgcagtaaaaaatattgtaaagtgtaggaataccccctttataatttttggtcccccaggaaccggaaaaacaataacggtggtggaatctgtatatcagatttggaaaaaatatcccaagtccagaatattaatttgtgctccttccaacgccgcaactaacgaagtcgctgtacgattaagaaaaattattcctaaatccgaaatatttagacttattgggattacctatgccaacagcaaaactgaactccaagaaataaaagatattgtaaacctaggcaaggataatgcattttacgaaccagctatggaagaattgcttaagtatagaattttgctaacaactgtagtgacaagtgccagacttgtcaatggtggagttccttccaatcatttttcgcacatattcatcgacgaaagtggctatgctacagaaacacaaacgcttattccaattgcagggatttcatcaaccagtgaaaacaaaggcatggttagtgctcaattagtacttgctggagatccaaaacaactaggtccgttggttcattctggatttgctgaatattgcggatacggtaaatcaatgctagaaagacttatttataatgaggtatattctaaaaacgaatccaattcgtttgataatcgttgtgtaacaaaattaatcagaaattatagatctcatgaatcgattattaaaccatcaagcaaattattttataacaatgaactaatagcagctggtaatccatttactgatttgttcatcggttcagatattcttataaacaagaagtttccggttattttccacaatgtagaaggtgaagacaaaagagatgagacatcgccaagtttctataatgtacaagaaattgagcagactgcggaatatatttcaaaattattctcaaataaagtaaaaggaatggcgattacagaggatcatattggtgttattgctccatacagaaaacaggttgagaagctgaaacaagcttgtgcacgaaaaaaatggagtaatttgctaattggatctgtggaacagtttcagggaaaagagaaactaattatcataatatctacagtaagatctaaaaatactagtaaatttgaagatattgacaagatgtgtaatctaggatttttaacaaatccaaagcgatttaatgtagcgttaacaagagcgaaggcccttttaatcgtaattggtaatggaactgttttgaaaaccgaccaaaattggtcgtccttcatacaatactgctccgaaaacaagtctactacaggaaaaagcttttaaatctaaattaaagattattggaaactattttatcaagccattggaagacttagattaagaatatttttttaaaataccaaaatatagttctaagtttttgtcacacgtagttttttaagtgtactaca

SEQ ID NO: 32 - DNA, 3189 bp, Diabrotica virgifera virgifera
  misc_feature (3181)..(3186): n is a, c, g, or t
aagtggtctagtgcaatagtgcaatatttttttcataaaaacgttgagtctaaactttgttaatcattttatcgtaattacaggttgataaacgttgccgtaggagtataaatcagttctttatcagatttatgtgattattcatcatcatggccgcgccaaggaatcagcggggatgtccagtatgtcctgcctctgtagagcacgatgaacatgatggtgtgcacaataactccattagacacaggctcaattatttgttaaagcaatggcatattgataggaagtcattggtaaaaaatcgtcatggtgcagaagttacaataaaactcggaaacgcttcgttagtagccaatgttaataatggaaaacattattataaaattacgttggattcgttgaggcaacaaggaaatgtacttgattttacatgtacggcgacaaacagaagaagagacgatatatttcttactagagtactactattatgtgaatatgaatatttttccatttttactactaacgagaatattaccccagatactgtagtacagctaatgccaaatacaaatcatcaagttatggttagattttctccggacaagtcaattgttggaggttacaacattccagtttgtttcaatttccagacaaacaatcgacaaactttctccatcattcgatcaattaatatctcagtggaagaaaccattgaagaaaatgagcaatacctgacgagtccatttactggaaatccatggtgggacgtacagcatatactcccacctacaggcaaatcgaagtactccgacagatatgcaattccagagtcttcaaaacgattttacttttacggtttacaagaatttcaagacatgagaagagaagacttaaaccatttaagagaattacagagacaaatgcaaccaggagaagttactagagagaatttcaaaaaattttggcataatgtcctttggattgaagaaatcggacaaacacttggtattcaacagtacaatatggagaatgtgtctttagacttattggataatgagctactaaaactagaagtgccaggtttagctgagaaacgtccttcgctaattgttggagatatggtacagattcgtgctcacattgaccatactggttacacgggaattataagaagagttactgattcgactgtagagattgggaacgtgaatagagagttgataatgatcattgagagccaatcagaagtgagggatatttatgatgtaaaatttgtgttaagtcggttatcatttgaacgacaacatcaaggtgtagatcaagtttcggcaaatggtttacttccgtgtatatttccatctcatgatgcaacattaagaggtagacaaacagaaagaatcattaacgatggagaattccttaatcaaacgattgctagaaatcaagagcagaagactgcagttagaaatattttaaatgcaacttcagttccatatccttacatagtatttgggcctccgggaacaggaaagactgtaacgatcgtagaggctattttacagcttaaatttaagaccactcacaatattcttgtctgtgccccttcaaatgctgcttgtgatttaattaccgaaaagctgctggaacattgcactacgaatgagttgattagagttatgtcatctactgttgacttgtcaaatgttcatgaaccggtattacgatattccaactacgaagaatatgagggatcgtggcaatataaaaaaatggattcggcatccttgaaaacttatagaatagtcgtgattactttaattcacgtcggtataatgggtggttactacaaaccagacgtggtattcgttgatgaagctgcacaagcatgtgaacctgaagtttgcatagccttaggtatggttaaacatggacagcagatagtattggccggagaccccaagcagcttggaccatcattaacttctgattctgcgatccgatatggcttaggtatatctctccttgagagaattatgcaaaccgaattgtatcaccaacataaccagcggtgtatcaccatgttgatacagaattttagaaaccatccaaagattctaacgttgcctaacgagctgttctacggagaccagttgcaggcccagtcacaaaggtcattattagaccccttagcaacaacttgcgtcttccaaaagctacaagaaatgtacagtgttgcgggaaagaagaactcacacccaaaattcacaggcgatgctgttgaattttgtagtttattatccaaagagcaaaggcagggaaagtcgcctagttatttcaacgtgaaagaggcgcaaatggtaataaagtacattagagctctgcaagctttagaatttctagatgaggaagacaaagtgaaaccttccgatatcggtattgttacgccgtatgccagacaggtgtatacattgaaagccctccttaaaggaaatcaaatcgaaggtgtcgatgtcggaacaactgaaacgtttcagggacgggagaaaagaattattattatatctactgtaagagcccaaaaagatttgttgctgtacgataaactttataagttaggcttcgttaaaaatgaaaagagattcaatgttgcacttaccagagctatgagtaaattaataatcatcggatgcgcgcaagttttggctacggacagaaaatggttgaaatacatggatctatgtgatacgctatccactttctggggagttccagttcctagaaagactgatgctgcagttaatcaaatcactcaaagtattggagccgtccaaatagatacccagtatcatcaataaactgtgcatttgtaaaaattatatgtttttagtctaagtgagaaagtgcatttgtaaaaattatatttttttagtctaagtgagaaaaactgttgtttcaaatattatttttatcaatgaacgttgacttagctattactttcctaaaaagaatttatgtaatatacttctccaagaaattaacgcaccatcttaaaactagggttatttttgatctctcgaatttcctaaacccgttgtccgatttaggtgatttgtttaatatgtagccttattctttaataatatcctggtaataatattgttgctagacaggtaaattgtcnnnnnnacc

SEQ ID NO: 33 - DNA, 7369 bp, Diabrotica virgifera virgifera
tttgatgttcattttagttcagctcaagaccaagaagaaatatttttggaaggtgaatacaaataaaaattgggattttaaaatatggaatcccgtggtggtaagggcagagcacgtggaagggctcgtggtgctccacagggaggtggaccaccaggaggagctcctcgacctggtcctcctggtcaacaagggcctggtgcccagggacctccgcaacaaaaccgcccacctggtgacccatggagtagagcggcagctcctcctcaacaacaaggtcctcctgccgcccagatgggtccgtgggtaagaccacagatgcctactccagcagccccagttgtaggtgctggaaggggatcacgctttggaggtggtgaaacaggtgaagtgtctgcacctgcagaacatgccagagctgttcaaggagcaggggatggggagaaatctcgtgctacaagtagtggtgtgagaggcagaaacctaaaatatgagataatccgtacgaagccggctgatatgcagtctaaaaagggtacatctggacagcctattaatttgatatcaaactatttcccaatgatacaggcaggaaaattcctgttgttccagtatcgtgttgattttaacccagacgttgatcacactggtgctcgcaagaagtttatgcatatagccctgaaagataccttaaatggatatctgtttgatggaaccgtgctatacacagctgcacgtatccagcctgatccattggagaagtttgtggaaaatgaagcaggagaaaaagtaagaattagcatccggatggtcagtgaactggcgtggggtgatttccactacatccaactatttaatatcttaattaggaaatgtttatcagcaatgaagctcactttgttacaaagagactactatgacccccagagccaagtaaatatccatgagcataaattgtctctttggccgggatattttacatccatacgccagcatgaaaaccaagtcatgatgaacatcgaattggctttcaaagtactccgggacgacacttgctacaacatgtttttggactgtagaggtccggaacctaaaaaagagttccagagtaaaattataggatcgagcgtattgactttttataataatagaacatacagaatagatgatgttgacttctcgcaaaatgctgatagtacattcccgttgagagatggctcacaaatgagctatgctcaatattattcagagaaatataagatccatattagggagaagcgtcaaccccttctagtgtcccgtagtaagcccagagaaatacgagctggaatgcccgaggtggtttacttgattccagagttatgtaaaccaacaggtttaacggatcgcatgagggaaaacttcagactcatgcaagcgctagccgagcatacacgagttggaccagttgacaggatgagaaagttacaagagttctgcaagcggttcctggggtgcgccgaagcagtgacggaactcaaaaagtgggatttcaagttggcagatcgcctagtacagtttcaaggaagagttcttcctatggagaccatcgttgccgccaataacgcaaggtatgcagctggaccgaaagcagattggacccgtgacttacgggcccaacgaatgttcaactctgcaaatatgacccgactagttacgatttgtccatcgagacaaaagaatgaatgccaggactttttacaaaccttacaaaaagctgctagaggcatgcaatgggatattggccggccagaaatctttgatatacctgacgacagaacaaatacgttctgtaccgctattgaaaatgtggcggcaagaatggatcccactcttatcatgtgtgttttgcctaccaatcaggcagaccgatatggttcaataaagaaaaagtgctatgtagatcgaggaatcccgagccaaatagtactaagaaaaaatctgacatcaaaaggtgtcatgtcaattgctactaaggtagcaattcaactgaactgcaagatcggaggagccccatggagtattgtaatgcctctgtcaaatgtgatggtagtgggttacgacgtttgtcgtgataccctaaagaagcagagtagtttcgctgcaatggtggctaccttggacagagcgatgactcgttactacaaccatgttacggagcatcaattgcaggaagagttatctgagaacattagtgcgtttttgattgttgcttgtcaaaagtacaaagaagttaatggtagataccctgaaaggatattgatctacagagatggtgtaggcgatgggcaacttccatttgtgttcacaatggaagtcgagagaataaaagaaaaactgacgagtgaaatttataaaaatggggatttaaagatgtcgttcattgttgtctccaaaagaatcaacacccgattctttactccaaattcaaatccacccccaggaaccgttgtagacgatatcgttaccctacctgagaggtttgacttctttgtagtaagtcaatgtgtcaaccagggaacagtagctccgaccagctacaatgttttatcagacaatatgggattatcacctgaccgtttacaaatgttaacatataaactgtgccatatgtattacaattggagtggtaccgtccgagtacccgcaccgtgtcaatatgcgcacaaacttgcgtttatgacggctcagcatttacatcgtcctgccaatagggcgttggaaaccctcctatactatttgtaaactggtggttaacccatgatttgggttttcacgaaagaatttttgttttttgttacttttatatttacgttagtttataaaatagttttaaaatttgacaaaaaaattttcataatatttcctttttaaaacattgcattattgcattttgacactgaagagccagaaaactacatatttgaggatctaagaagcaagtttcaccaagtcactaagttaaatgtaaaaatgattgctaactactgcagtataacagaatgtttctcaaatcggtaacatgattacaagaaagatatacaagcctattgaatgagtcctccgaataacgtaagtgctagattattcgtttttaaaagtagaacaaaaattttaaaattataatattggtaaattgttggctgcgtttagagatatttataaacttcgttgggtgcgttacgaggcgtatatctcccgtataccccatttaccactgtgcattatgacacagtcgacgcgcaacgcagccaactgttagtgtagtatttacatgagacggtaaaagtaaattacgataaacgccaaaccttgagttcataaaaaatgtattcgatttttgaattaacataacgattcatatttacttggacttagtgtattttttgttaacgtaaagctttaggtttagagcttttttttgttcttttcttttttcaattataatatacaataattacttaaatctacaggatttaaaacaaaataacaacaaaacaaacatgtttgttttgttttaacaaacatgcctgctttgttttaacaaaatttcttaaatacagggtaaattttattgctacaatctatatttacaatttttgatatgttcgtaaattgtttttaatatattaatatcttcagaaaatatcaaattgttcaggtagacgggaagtggaatttttaatatattaagattatcataaaatttgtttatatttactgattgatgtgaacattcgaggagaatatgtagtagatcaccttcttttccacactcacagttaggtgactctgtgagacccagactgtacatatgaaggggggtaagagcatgattacatctcaatctatttataactcttatgaaatggcgatttgatacagaatgaaaccatcttttaatgggaatttcaggtcgcatttgtttgtaattactaccagttctcgtgtttcgataatacctttgccaattttctttttggtgtcgtctactaataatatcaatatccgaaatgggtagtaagttcatgggaagttcttcgcctatttctagggcggatttggctagcctgtctactatttcgttacccctaatgcctgcgtgtccctttatccatgatataatgatgttttttcctaaatttgcaattttattataaagagtcataatttccagttctatatgattgagttgttggtacttatgtacgttagttagtctatcaacgacactcttactgtctgtaaatattatgcagctatagggttcgttactaaatatgtgtcttaaagcaaaaagtatcgctatcatttcagcggtgtatatcgatgattcacaaggcaatttgaataattttttaaatccactttgaatattgattattgcacatcctactttgttttgtactttggatccatctgtatagtaaaactgataatgtggccatttatgaagtataaatgattgaaaaacggctggatttaaattaatatccataaaaaaagtattaatttgttttgagaaaatttcttctaatacatgggaatacataggtgaaacttgattttcataagtatagaaagtacttcggtattgagatattttcaagtaactatctacaagaaggggacattttttctttgtccaatatttatgagttagatctaaaattgataacttatgtatatcctgcagatagtttgtattttttcctatagctctagtaataaatttatcacttaaaaactgtcgtcgaaattccaggggtggttctatcgcctcaacttccattatattaacgggtgtagacttcaaatatccaagacaaagtcgaagacatttatttttttgtatttctaatttattcaaatgtgtgtttgcagcagttccatacagatgacaactgtaatcgaaaataggacgaatcatagtacggtaaaataaaagtgctatatttggatcggcaccccaattagttctacaaaaggctcgtagaatattcattgcattttcagacttttttatgatatgatgcatgtgatccttccatagaagttttctatccaaataagtaccgagatattttatacaatttttaataggatattgaatttgacctactgccaaatgaccttgtggaatttgacgatttctggagaaaatgcaaatttctgttttagattctgatattgctaaaccaatattttgatagtgattaagaacagccttaattgagacattaaaattatttttacatatatccaatgatttgtgggatgtgtaaactactacatcatcagcatattgaataatctttgttgtgctattaatacaattttctaaatcaatattatataaaatatataacattggacttaatatgctaccctgtggtagtcctatatttgtaagacgtggagtggagatggaattgttgatttttaaaaccgtccatctattagtgtacagtgtcctcagaaatctagctaagttgatgggaaaaccaatgtctactagttttttatacataatgtccaaattaacggtatcgaatgcagaagagacatctagaaaagcagccatagtatacgcattatcagtaaagtttattagtatagatgagactaaggaagttatcgcatcttgagttgattttgattttcgaaatccatactgagattttgggaaaatatcttcttgctctaaccagtgttcaattctattttttattaatctttctaacgtctttaggaagcaagaagctagggattttggtctatatgaactataagaattttcaggttttccaggttttttaataggtattagaatatattccttccaactctctggaatttgtgacgtgtcattccaaatttcattaaaaatatgtaataatgatattttatattgaagtggtatatggtatatcatggaatatgaaatattgtctttacctggagcactgctattttgttgactaagtactcgatctaactcccacaatttaaatggttgttctaagccaaacttatcccttgaaactgtttcgctgtattctggaaaatattgggaaggtacccactgaggagatattttattatgaaattcatctagccagcttgaatttggatttattggaaacttgttggactgtttgcggtttttaaaggcgtttactttcttccatacttcactgatttttgttttggagttaaggctttcgcagtactctatccaattctgttttttcttttgcttgaagagtttttttgcgacagcatcaagtctcttaaattcaaataaattattccttgtagggttttgtttatattttccgtatgcaattttacggttatcagcagcagttttacaactttcgcaccaccattggtttgagatttgtctcttatgtatgacgttagatgaaaacttcggtattgctaaattggctgctttattgatgtttgctattaactgttgataattaccgggagaattttcagcttctagtacagaggtgtataagtcccaatcggccttgttaagattccagatcttatgaaagttttcagttggagatgaagttgtattatctgtttccatgtttatgataatcggaagatgattggatccatgaggatcttgtaagacactccacgttaaaaaatttgaaatatcttgagtacaaaatgttaagtcaatagcagatggactgttactagttgctaatgtgggcgacccatcattcagacatatcaaattacaatgatcaatactttctaaaagttttttaccataattgtcttcaatttcacagccccatgcgatactgtgggcattaaaatcgccaccaataataaaaggcttaggaatatctgtaaagaattccaaccattgtctttcagatatctgggtttttggttcaatgtatactgagacaatagtaataggatttttgtttcgaaaaatttgaactgaaatacatttatgagtgaaaggatgtctatttttaagatttatttcttcacatcttatgtttgattttaataaaatggcagttccaccatacccgtctgcacgatctgatctaaagcaattataacctttaaaattataatagtattttgatttaaaccaggtttctgagagtaatgctatggaaatttgattttgatatagcagatattctaaatttactttattagctactgctgaacgacaattccattgcagcatattcatatttgtgatgtctgcgaatttgaagacaagggttagtttacatgattactaacccgggagtagtcgcgctcacttttgtaacgt

SEQ ID NO: 34 - DNA, 4185 bp, Diabrotica virgifera virgifera
attaatgacattttcaattttctaatttgtggtgagtgaaataaaatattctaatctttgatttaaaagtggttaaaagtgctgtgtatttgctgatttcgaacttgtttgcagtgcaatgatttcaacttagggttgtgtatattgtgaatagctatccaaaatggataaagatagcgttattaaatatgtgagaggactgatcatttcctcggcgattccgttaacgataaagaatcttgatagagattatagaacacttgaaggggaaagaataccatatgccaagttaggttatagatctctggaagagtttttaaaatctgcccctacattgaatttgactcaaaatagcaatggagaaattgtcgttcaagcccagcgtattgaggcatcagctcatattgtcgatatggttaaaaaacaaaaaccgccgaaaaagttgaaacgtgcccgttttttaaaagcgcctccaccgagaacttggcgtgcgaacaattctcaaaagtattatgacaaaaaacaattcacatcacccagagtcgctagagtagcccacaatcaatttgtagactacaaacaacctaaaatagcttcaaaagtagtggtgccggatcattcttcattttcccacagcaaaaatttacctccaaggttacagaaacaaacgtcacagaacccaccaaattcttcacaaaacagtcgattacaagtaacttatgatgatatagctactgaggatttatttcacaattcggcaacgtcaccaagtttcataatctacagtcaaaagtgtagggatgttttcacaaagagcaatacggctttcgctgccaacacgttacgagaaatcagaaaggcctctttggaggaggaggaggttaacaattccggctctagtagaaggaggatgatcacgcaaaagatgtcagaaatcaacttagagcgagatagcgggaaattgataacgccaaagatgccagaaatcaacttagagcgagacatcgggagaataataacgccaaagatatcagaagtcaacttcgagcgagatagcgggaacagcagccctgtgagcgatgtcactcccccgccagtcagtgttcccgaatttgcgctgacaaacaatccaaaagtagacttaacaaatttcgtagaattatataaacttggaaaaatagaagtgagtacaaaatcagtcagtacaaaaagactgaatatgtacacttgtaagattacgatcggcagccataagtttaacagctaccccgaagaattccctactcgtgaggctgcagagttatattgttataaacaagccttagaagaaatgactgccagatacggaaaaagcaaaagcttatttttagcgaacgataacgacattctaaaacgaattcctgatatgctcaaaaaacacaacagtggtatatgggaatggcagctccagttagattactcacaaaggtataacgaacagttgcccgaggattggttaaagatagttgacaggagcccttttatacatgtacaaaaaattgtaaataattatacattaaaatattgcagacctgaagatgtatttcagaaaggaattgtctttatgaaatcaatgacaatctcagatgtatcagtgccagctaacacagtacggctggacgacaatcataagacttacgccgaaataacgtatattccatccgccaatgagatctggtgtcgccaaattggtacagaggagacggaggcgcatagccaaatgatatccagcatggaggaatattacgagaacaatctagaaaatcttcacgccgtcaacattaatcccaaaggatactatgtggccaatttcaacaataattggtttagagttcgagccatcgaagtaaacgaaacaaacgtgaaatgcttctacatagacttcggggatgaagtaaccctccttaaagagcagctctaccaattaaagagagaatttgcgttctgtgaagctcaagcttttgtatgtcgactagcaggactagaggatatttatgaagtgtcgcaagattctcaaactttagaagaatttctatatagagccgtagaaatagaactcgctgaggaaacaatagaagcagagaaccaaattatacctgtttacatgtacgacgtggaggtgggttcttgcattaacttcgatgtaatgatgctgcttgatcaggaatacgcaactcccattataggagacagcataaccgaaatatgtgtctcgcatattgccgaaaacggtgacatctatatacaagtcagtggccacggccatcaaagactattacaacttctggcagatctggaatctcaaatagtaaatgatcctcctactcacacgcttcaacgaatcacaaaggcagacagtcaatcgaaaatttacttaggaaaataccatgccgatgggcattggtatagggtgaagatactcgattggtcaccagatgaaaactttattcaaatctattatgtagattttggcaatactgaagttattaaagtaaaagaagccgttttatatcctctggataagttaaatgacgtaataaacaattaccctcatcaagctgttcgcacgagaattcttttggatagcccactagagaatataaagtccgtgcttactacctcaattcctatgaacgaacccataattgctaaagtaactggctacactcaagatgatgacaaaatcccgttggtcgagttcttcagcagaccgcccaaagggggcttgttctgtattaataaatccattaatatggctaatgatataaagaaagtggaaaacacaacaattaataaaaaagtacaattctctgttgaaaaaccaagtgtaaaattttccgttgaaaaatcaaagaacgttccttctggtggtcaattggcatgtccaccactaccagaaaaaaatgcgtattttgaaatacatataccttttgcggtaaatccgtataatttctttgttcagccgttagagtcactttcgaagttaaataaaatgatggagcagctgcaggaaacatataaagatgtgacctacagcccacttaccttagataaaatcgaacctggtaacatctatgcatcaagatttgatgacggtaattggtataggactaccgtaatcaaagtgatacatgacggatcaatctccgtcttttattgcgattttggttactatagtaacttgactctacaacagttgctgccactaaacgtggaattcctgaatttaccttaccaggctctcaaagccaaaatggcagggataagaccgagtcacataaactggacagtggaaaattgtgataaatttaaggagattgtagaaagaaaaaacctatactccttggttatgaatattgaaaaagatcagctctatgactctgatttagtgttagaacttatgttaatagatacatccggtgaagatgatattaatatcgatgagtatcttattaaccaaggcatagcagttaaagcttaattagccaaagctcattgatttttagtctttacgtgctttaatccagtttacaaatactatgtattcgtttgctaaccttattgttcattcccgttttgttcaatgtatatataaataaccgtcatttaacagagtaaagtaagactgcccgtaatcaaaaaatgggatacaaaatgaacaaaactcgtgtttgtgatggtacaaaactgaataatgaatgagaaaacgatcaaaatttgtccctttgattcaaaattcccttttaactgagttgcattggtacaaaaattggtgcaaacattccatattatataatttaatctaaaactgtcagaagttacttgttaaagaaacgtaatatttgtatgtacgagggtaatatcaaaatttttctatgttgctgtgatataataacaataaattattattatcttaaaattagttttatacaactgtacccaatgtgtattagaggaatgatttcctcaaatttttctcttggaatatctttaaaatatccattcactattgatatcgcctcgtcattgaagcaaggaagtttttcagttccaaatttctaaattttggtttgcttaagatattttttaaagtagaagccacagttagaatgcagtgttggtcttacgacgcgcagcgatgccgct

SEQ ID NO: 35 - DNA, 4386 bp, Diabrotica virgifera virgifera
cacagtttattttcattttctttttctcttttggctggaattcaaaaacgtactaaactaatctacgactgtctacgacgccggtacaacgtgttctgtgtttttaattttaggctttagctcaaactcaaagtgattgtttttctttctattaaaatagttaaacaaaataaggctcaacaagtgatgtagattaaaacgttacgtttttgttaacgttgttgaaaagtttttatatcttaagaagaattggaatttactaattttaattatggatgcccttaaaactatggttagaagtgtactgacttctagtccaacagcattaactgttgataggctgtgtaaagaatatagggatattttaggtgaaaatattcctttccacaaatatggttataattcagtggaacattttttaagggatattccagacactgtacagttagttggtaccggacgatttgctacagtcaacttggtgttttctgaaaaatcagcccatattgcacaaatggtgtcaaaacaaaaattagccaaaaagaaagcacatcagccctaccaaagaagaacagtagtagttccaccacagcgttcaacgtacaatgtcgacagtataagaccggctgaaaggcaaagaatggtatatccaccaattaaatcttcatatccacctacacagaataattccaacagaaattctcaaatgcaatatccaccaagcaaaccttcatatacacctacgcaaaataattctaacagaaataactctcaaatggtttatccaccaagcaaaccttcatatacacctacccagaataatggtaacacacattcttctaattacaaacaaactatctatggacctccttcaccttcaacttcaggacactcaactgctggcacaagtagtccagaacagaatgaatcaaatgccaagccatttgaatatagaagtaataacgtagaacagaagaaatcatatggcaaaccatttgaatatagaaataatagcgtagaacagaaggaaccgcctaccaagccatttgaatatagaagtaatagcgtagaacagaagaaatcacataccgaaccatttgaatatagaaataatagcgtagaacagaaggaatcacatgccaagccatttgaaaatagaagtaatagcgtagaacagacgaaatcacataccgaaccatttgaatatagaaataatacgatagaacagaaggaatcttctgtcaagccagttgaaaatagaaataatagcgtagatactgatcttactccgaatgtacaaaatttatcgatcgcaaaaggcagtttaagtacggttagaagaacgaataaaagtttatcacaaagccatgttggtgcaatcaataagtatttaactcaaaatagtctgttttcacaagacgccgaaggtaatgtgcctgccaacataaaaaataatctcaggctattaatacaagaacatcctgaaggtatgtggtgtacagaacttcctattttttacaggaaaaagtttaacacggagttgaaattttttgagttgggcttcagaaatctcatagaactctgtatggatttaaaatcagtatttcattgggcaaggcctggtcaaggcgattttaggttatatgacaagagtaaaccattgcctgataatgcagaaaagaatttcactgtagctagttattccaaaccaatagaaaccattagtaaacctcaggttgacggtgccgtgcctccccttgactgggaagatgtattaggcttcttaccgcaagatgtacttctactaggtgacgaaatacctcggtattttgtgcctcgcgagacaactgaaaacgacattttagatgtagtagtttgtgaaatatgcgatgcttcaaaattttgggttattgcagataatggaaagctggataaacttatggatgatatgcaggagttttataacaaagatggagataaatacaagataccaaaggcacttatacgcaaaggactatattgtgtcagcataatttttggggaatatcaccgaggtctaattacagaggtcatgagtaatggtaaaaacagaatattttacatcgattatggcaccataagaatagacactaatgagttatacttccttcatgatcggttttctgaattaccggcccagacacttagatgtaaattgactggcattcaaccccctatcaaaggagcggcatggtctaatgaaagtacactcgagtttaaagcgttgacaaaaacagacaaaaaatatgtggctaagatatcaaggattaaatgggaggagcaagtattggaagtttttttagctgatgtatcgagtacaccagttttctacataaatgatcgtttagtaaaaaagggtcatgctgtatacgttgatcaagagcagcagacaattaaagtagattctttaagcagacaattagtatccaatttgcatttgtttccgactttcgtggaactagaatatggattggcaccttcctacgaaatggacaatttttatgatctgaacgttcccataaagttttgttatccccaatatttcgaaacggactatagtaatgaagaacgttcaattgaagaacgtttcaagacttatgaaaaggtggtattgaaaacactaagaacccaaaaatttcagttttcgagaaaagatattgagtatttcgaagacaaatcaattgattacgacttttttggcgcattaagagacgaaattgaagaattcgcattgaaacaaaaactgggcaaaaacaccgaaaaattaaatgatcacagtgaagaacaaaatcaaaataaagaattaagtatagaagagcaagaattaaagattgaaggcttaaaagaacttacagtaaatcgaatgctttcagaagatattctcaaagacatcactactatagctacatattcggacgcaagtgcagaagagttgatgaaggaattagacgtcatgtcagaatatactgaaagccatgcttctatatacacagaagggaaggatcacgaaataaatcataggtactatgactacgaaaaaaatagtgaaccttctgataatcaaaaccgtcaagacctggtattttcatcactcactagtgcacaagcttcagattacggtagtgacgtttatcatgatttatccgttgataatatgagtcgacataactctcaatacccaccagttaaaaatagatttgattacattaagcagaaaataacgtcactccagttacaacctgaagacacgacaagtgaaccatacttcactggggacgaaattactgccaaaatcagtgaaggtagttacacagaaaaacagaaatctaccaatcccttttggaattctgacgaggaaaacgagaatattagcaggctacatccaacaaatccctttttatatcatcttaagaacgcagaagaaccttcgcaccaaagaacacttgatgtgtctacttcattatcctcttacagtgaagttgaaatccaaagacaattgaatgtggttaaccgtgcaaattcggtcttaacgtctacaaataatccaatacagggtaacaatgcaaacatttccaccacttgccaaactaatagaaatttgatggttaacactgtaaatcctgtcgtaacgactacaaataatccagtaagggttaccaatacaaatgtatccactgcttgccaaaccaatattgacaatggtcgatcaagtttagatgttaacgctcttccatttttccctacttttagttgtactgttccagtcaatccacttcctgtcaatccatattatgcatacaacttacctgcatatgatcccactgttttttgcaacccttattatcagcgaacgttgacaccttcagttttgatgacaccctcgtttacgccgcagccccaaatactcacaaatttcaacaaacctagatgtcctcctcctccgggttttttaccgaaataaatacaatgatttggtagaattttgtgtaataagatatcgtcaatgatgtaatcactgataagtttaaagaaatcaaatggatgtacctactaaggcggttcgataagtacttgccttcaaaagaaaaagtagtcttcttttagctcgatgcactaacccaagcgatgctccaccttctttaacctgtctgaaaaatacgtttttttcaaggtctgcaaagtagacttccgtggcggtgatgaactcctcattcggcgagtgactttttcaagtttggaaacaaaaagaagtcttcttcttcatgtaccatgtcctttcagaacgttggttaccatcatagctatcctaattttattcactgccaccctaaatcaaccacgaagtgc

SEQ ID NO: 36 - DNA, 682 bp, Diabrotica virgifera virgifera
ttacacagtttacatacaaattgtagttcacaatttacaagggttcacaagggttttcttattactgaaaactttaaacataatttaaatcggaagaaatggttaaaactagaggtaaagaagataatccagaggtagtggtacctgtgccgactgacactcctgctgggaccacagaagaattttcagttgaaaaaattttagataaaagaacaagaacagaagaattttcagttgaaaaaattttagataaaagaacaagaaatggcaaaattgaatatttgttgaaatggaagggatataatgaggaagacaacacttgggagccagaagaaaaccttgactgtccagacttaatagcagcctatgaagctcagtttgaactggcaagcacggtagatgatccagaaaaatcaaaacgaaagaatatcactgaagacaacagagcaagaggttttgatagaggacttgaaccccataggattgtgggagcgacagatgcaagtggtgaacttatgttcttaatgatgtggaaaaattgcaaggaagctgatctagttccagccaatcaagtgaatgccagatgtccagaaatcgtcattagttattatgaaaataagaagcaatggtacagcaagagtgctgtcattgaattagattagtttattaaaattataaggat

SEQ ID NO: 37 - DNA, 1706 bp, Diabrotica virgifera virgifera
  misc_feature (1605)..(1666): n is a, c, g, or t
  misc_feature (1673)..(1700): n is a, c, g, or t
ttcaaatcaataaagccagaaaattttgttttttgtttttagtttttactatttcgatttgatttgaatgcatgtgtttatctagtgctgcaaaataaattttatcagaagtactaacgatattgattattgatcaccatgtctattataaaggaaccagtgaatttgaaggccttaatggaaggtgggtatgaatttaccgtcaataatgatgatgaagttatacaacaagacgatcctgaagaggaacgtgaatataagaataatttattaaaattcatgaacatgcaagtagcaggagattttcaggacgaagattcctatgttcaaggtcagccatttgaagtcatagcctctaaaatgaagaatctgacgaatgatggagcagttaagaagaaagtgattcgagaaggatatggagcgaaaccacaggattcggaaatggtgcgtgtgcaatacaatgcctatatagaatacaatgcagaaccttttgattctacttatgccagaaatagacctcatcagtttcttataaactgtggtgaggtcattgttgggttagatatagctgtgcaaagtatgcaagtgagtgaaaaatcccaatttttaatccaaccaatgtttgcgtatggtgcccttggttgtcttcaaagagttccaccagacactgaggttttatttgagatagaactggtagaaattgtaaatataggggctgcgaaaagatttgaagcattaccaaaagaagaacaaaataatttcttatttgtttacgagtattgtttggcattatgtgctaaaggtaaagatatatattcaagaaacattaaaggtgctataagggagtacaacatggctgtatcaaaattagaaatgtgtcaattagacacttatgaagatcaagtcaaacaacaggaattattgttaaagttatactctaatttactggtggcttgtactaaaactgaagaatataaaaaagcatgcattaattttaacaaaatcaatgaattggtgaaaggaactgatctaaaaatttctgctaaaatgtattacaacagtgctaaatgcctaagaatgttgggagattaccatttagccaaaagaagattaaatgaagcactaaaattagaacccaaaaataaagaaattttgcaggaactagttgagttggaacatacgattaaacaatacaaagaaaaagaatctctagttgccaaagcttttatatctggacaaaaagcataaatgctaacaattatgaatttttgacgaatattatatattctacctttttttattttgttaaaatattaatgtctcagtggcggctctagaaaatttaactggggtaggcaaattaccggggggtgtggaagtttttataattattcagctggaaatcactttttagcgaatttttgattagaaaatggtttcatgacaagaaaaaaaggtctcatggcaagacttttgaggtcccagaaacccaaaaataatagacgtatatattaatatattatgtccgtaaacatgataacttctgaacaaaatatatttttataaataattaaccagagtattatgcagctgctgcattttcgnnnnnnnnnnnnnnnnnnnnnnnnnnnnnnnnnnnnnnnnnnnnnnnnnnnnnnnnnnnnnngaaaccnnnnnnnnnnnnnnnnnnnnnnnnnnnnagatgg

SEQ ID NO: 38 - DNA, 1713 bp, Diabrotica virgifera virgifera
ttttaaaagaggataaactattgttaaatttgagaaaattgagagagtaattgttgaaaccgaaattctaaactttaaaaaccattctaaaaaagatttggtgattgtaaaaatcataacacaggccgcatgcgcagtacaaaagttcaaatgtcattctttggatgaaggctagagcgctaaacatttttcattcttcaaaaaccgattttaataacagtattataaaacttttccagtaaatattccagaaccgcgttgttaatatcttgcagtagccgtagtaaattaaaatttgatccaatggcctctccggtagatatttcaccgaataaagacggaggtgtgttgaaagaaatactccaggaaggtactggagaggaactaccaccccaaggaagcaaagttacagtacactatactggtaccttaactgatggaaccaaattcgattctagcagggacagaaatgacccattccaattcgatttgggaaaaggtaatgtaatcaaagcatgggatattggtgtagctaccatgaagaaaggggagcgggccatgttgacatgtgcccctcaatatgcttatggtgaaagtggcagtcctccgactattcctccaaattctactctcaaatttgatgttgaagtattaagctggaaaggagaagatttgagtccgaatagagatggaggcatagagagaatccaaatcactgctggcgaaggatattcgactcctaatgatggggctcaagttgaagttcatctcattggaaaacacgacggtaggatttttgatgagagggatgcagcttttgctgttggagaagcatcagaagctaatgtaatctcagccattgacatagcgatacaaaaattcaagaaaaacgagacctctagacttattgttcatcctaaatatgcctttggagctaatgcttcacaagaattcaacattccagctaatgctacagtagagtatacagttacactaagaaacttcgagaaattaaaagaaagctggtcacttgattccgaagaaaaaattcaacaatgcaaattgtttaaggaaaaaggaacaaactactttaaaaatgggaagtatgaatctgccgtgaagttgtacaagaggatacatagttatttggagaaggatactgatactgacactcaagaagacagaaatgccttgctactagctgcacatttaaacatcgccctatgtcaattgaaacttaaagagtactttgaagctcgctcagctgctacctctgccttaaatatcgatcccgacaacgaaaaagctctctttagacgaggacaagcatacattcaattgcgagagcccgagttggccagacaagactttacaaggtgtttagagatagatccgaacaacacagctgcgaaatctcaactaaccatttgttcgaaaacgttgaaggaacaactacagaaagagaagaagatttacgccaatatgttcgacaaattcgccaaaatggacacgcagagggaagaatatgagaacagaaaactgcccaatgtgatgagctccgtcggcgaatggggtcaggaagacagagaaagagaacccagcgaatttgaaaaggaaaatcccgacattattctactaaataaaactggcgagtttaaagatatgtaaacattttgtatttcaataaatttatttaaaatcaaaaaaaaaaaa

SEQ ID NO: 39 - DNA, 4865 bp, Diabrotica virgifera virgifera
ccacctttacttaacaagccatgaagttgaaacttggcaacacctattggtagaccgattaattctgacagttctcatttgtttttaaataattttcactgtatttacagagaaactgaaatattttacaatatttcgtgctccaaattacaaagaacattaaaagctttccaagctattctagttccagacgtatactatttgaacaaaatgaataaattattggaaaatttccataaaattccagttatcccaactggccaagttaatggggtcgtggggatttcaactgaagatgattattcttctacagatgagagtgaagaggaagaaggagaggaatatgaacaagaatatgtagccgaggaaaaaaagaaatatgcatcttttaaggttgatcaggaaccaagcactatgtcagaagtggaaggggttgatggcattactttcaagaacaatccattacatgtatattcgcagtacagcttcaacactacatctcggaaaaaggagctaccaattgatgattttaaagacaagattctgtaccatattggtacatataacgttgttatcattcatggacctacaggatgtggcaaaacaacccaagtacctcagttcatattagattattgccgtgatgagggaaaatactgtaatattgctgtaacacagcccagaaaaatagctacaatcaatattgccaaaagagtgtgcgaagaaagaggttgggcaatgggcacagtttgtgggtatcaggtgggattagagaaaaaactttcacctgattcgattttaacttatatgaccactggagtcctacttcaaaaaataattcacttgaaaagattaaccgagtacactcatatcattatagatgagattcacgaaagaactcaagagttagatttcttgttactgttaataagaaagtttttgtatgcacagaattctacaactaagattattttgatgtccgctaccattaaagctgaagaatttgcaaattatttccaatgtaaaaacgacgtttcgttcttagctcctattatacaagtagacaaggacagtaacttcaccaaaacactttactacttagaagatcttaaatctgtcttcgataccacaaaagctgcgtttccaactttcgatatagataaaccagaaatttcagaaggtctctggaaagtttttacttgcttagtatcattgatcgatcgatttgattttaaagataaatataccaacgagcttataatcggaagtattttggtatttttgcccggtatttacgagatcgaggaggcgcataaatatcttcgtgaacattctgaaacttatgcccagaggcagaatcccaatcgtataaaatgggatataatacctctacattcatccctacccaatgacgaacttgccaaagctttcttacccacgaaaaaaggattcaggaaagtaattttatcgaccaatattgcggagagttccatcacagttccagattcttattatgtgattgacttttgcatgaccaaaagtatgacgatcgaccctattacgaaatatatgagtttaagactagaatggggatcgcaagtcaattgtgaacagagagcaggacgagttggacgtattggtgatggaagagtatatcgtttagtacctcgtgatttttatgagcaaaatatggcggcctccagcataccagatatattaagggctccgttagaacgagtagttttacaagcaaaaatgttggaattaaatgatactccacaacaaatcttgtcattagctatgaacccacccaatctgaagaatattagaatgacaattctcagccttaaagaggcaggtgctttgttacaaacttgccgaaatgaatacaaaatagctgatggtgaccttacattcttaggacacgttatggcatctttgccagtggatataaatctatccaaactaatagtgttcggacatctattcaactgtttacaggaagctattataatggctactggttgctcgatacaaaacatcttttccataccctttcaaaaaagatttgctgcttaccagaaactgttcctttgggctgatgattcctttagtgatctaattgctttgcttaatttgtatcaggtatggcaaacgtgcaaagcagatggaagttttgatgtacatggtgaacgacaatggtgttcgaaaaaccttgttagtttaaaaggtttaagagaatggcaacaaatggtaaaggaaataaatcagcgcttggaatttttgaatataaaacagatccatggacagacggaattacaaatcgacgaaaagcctcttgtattgaagatgatcatcgctggagcattttatcccaacttttttataagagaacaaaacgcaaatgaagtcgacgacaagcaactcgttagagctgttggaggtcgagatccatatcgttcagtgtatcttacgggaatggattctcaacagcccggtcctgtttacattagagctattaagagtctcttcaaaaatgaaaacgatagaaatactaatatatcaataggttttgactctagtaataaaatctacgttgaattcaaagttttaagccaataccaaaatagaatggctatttcaatcaatggtagacagatggtggccgacaccattcttggaaagattccacgcgaagtttatgaagctatcagaaaaagacaactgcagcaccaatttcagctacagttattaccattaaaagaagcttggaaatatgctgaagaaaagggatttacaagaaaaagtgcacttcagaaacttgcccatgaggatatacccatgccctcaacttttgcggatagaaactgttttagtttaggagcacataatcccatacctggattagacgtcgaatggattactctaaaaattacggagtatgaggatgcgggtcatttttgggctaataatttggaaagtgaaccttatcttaccgcaatagaagaaatactaaacaaggctattcttcactccgttgtttctagaggccaaaccgtagaagtaggatccacctacgccgctcgattcgtcgaggataatatgttttataggtgcaaagttttttcagtttcgcccacatatgctgaggtacgttttattgactatggaaacatgcaacgggtacctataaaagagatttatcttttaccaaatagaccagaatgttcgtttgagccccttgcaattgagtgtgctttacatggaattaaaccttcaagaaaagctaatataagaggaatatggtcagaagcaaccaccaacttcgtgaagaaacacacttttaatatcttattgtatggcagggtacattctgttgtggataaggtagtatatctagaggtctacaaacgtgatccacatatgaataactctaaatcgctaaacttggttatgcttgaagacggatgggctgaacccgcaatagaaagttatcactcaagggatgactccaataatcgacaaaaagtatacgcatctgacaatccaagggcagaagctgtaaggttgagttttgataaagtccaaagttatgacgattttgatgcgccacagatgtctacaagagggaaaactatatatttgaaaggcccccacagcccattagaaatgaaagtttacagttgtctcgaaagttcaaataataaaactattgatgttgaagggtcttcaattaatactgtattgttagatactgcacctcaggatccacacaccaggttactggtcgcggcttacgtatcgcaatcggctaacagtgatcatttgaaattgcgacagactactctaatgccaaatataccaggactacctatgttgttgacacttctgttttgtcccaaaatgagccccaaagtaactgatgatggcacaaaagtcgcatctattctctgtggtctcggctatgatccaatcacgctaaaatcatattatccatcacatgattttattttaacccttgacacagaattgacggaggacgaagtaaacagagtaaattgcgtacgcttcgcaatgaaccaaggattgaaagtaatggctgaggttgcatttgaacacgctaacccgcgagacatgcttctgaaacaaaaagagttaaagaacagtcttatggagttactgcatgctgaccgcagatccgttgaaagatcaagtgtgccgtatgccaatgtatggcacaaaaataattttgaatcaacgattttaacatccgggatggatgaaaatcaaatatggccactactagattttgtaaaattatgtaatcgagaaggatatcatcccgaagtatctaaaaacttaaacgatttagatctcatggcgagaaagatgcttcctgctgcccccattcaatgttatctgtgtcgggtagaattactttttgtgcatgatgtacgtttccaccttatttccaaagatcataaagaaagagtggcagcatataatccccaatatacaattaagcagtattgattagcatgatgatttttgctgttgctgttggatattttctggatattgtagaattacattatagattttacaatgtttaacataaagaagatgaatctgaagatactaacgaattatatccagaaatttaatctgatgaatgtgttacttattttgatatattttcagttgtgataagcattagtttttaagtgtttagttcacaaagtttgtatttccattgtattttagttacacttgttttgcttttaggttattaagtctaagttttgtttctttgaaggtactcttcaaatatattttgttacttcttattaataaatatttgaatt

SEQ ID NO: 40 - DNA, 1578 bp, Diabrotica virgifera virgifera
aattccttagaaactgccaaagaatttctttattctttaaaagcagatacagctgatataacagattcaggcatagaagaagtaaatatgttaagaggtcaatcacttaaaacagacaatttcagtcagatgaaattgccaataaacctggtaaacaggctttgttctaagaaaatagacaaagcttctttggtgcagaaaaatgtgattccttttattttggaaggtaatccagtaagcgtacaaagtagaagtgggtctggcaaaactattgcgtatactgttggtactcttcctaaaattgttggggatagaagtgtgcaatgtttggttatcactcctactaaagtgttaagcaggcaagtttcagaggaaataactttttttgctgactctttagagcttaaagtgagtcacccagttacctgggctgattacgtacacaatactgctgaaatagtggttggatgcccaggcactctacttaacttgatagataactttttgaacgtacaaataattatacttgacgaagcagatttccttttagacccaagaaaaatgggtcaagagactattttaatccttaaacttatccctaacgcacaaagattatatttttctgccacttattcacctaaaattaaagaaataattaataacatagaaaaaggaaattttttagctgagtttagaagtatgatggaaggaagactctcgtaccaaactaaattattgttgaacaacttatcaaagcaaagtaaattaaatttaccaaaccaattcaataaaaaagaattaataacattctatgaagcaaagaatgataaaccagaagaaattaaattatttcacactttcgtgccggaaaacgagaaaaccaattttttgttacaactttataatttattgcctatgtcacagtcaattatatttgtttctaagcgtagcacagtagaaagcttaaaaaaagtgtttgaagatgatttataccaagtgtcattcttacacggagatatgaacgaagaatgtaaaagaaatttcgttgatgaattttcacaaggtaaaactaagattcttatcaccactgatatcttttctagaggattggacatccctcttgttaacgcgataatcaattatgacctgcctatgaacagaaatataggaatggtagacacatacattcataggataggaaggtctggtagatttggtagaaaagggtttgtgcttgatttttgtgcatctgatgctgattttcaggcagtaaagaatttctctgataagctttcttttgagaataagtttttttatatggcagatttagagattgcttggaaagaaattgaatcttctaatttttattaaatatttactgtcaacaacgatttggtatattgttgctttaatagacgaggaaatgaagcagaaaaaaagcccaaaacctgtcattttttgccgttggatggatcttaataaaatttgttgcagttgcaatagatttgtaagatcgttaagaaaatttgtgaactaaagttttaatatcgaaatgaaaataacattatttaacaagga

SEQ ID NO: 41 - DNA, 1489 bp, Diabrotica virgifera virgifera
  misc_feature (977)..(1038): n is a, c, g, or t
gtgcctcagggttctgtcacaaagccgtgtattatggcacatacaccgctaaaatcgttcacgatcaactctatcttgccggaaacggcgctagatgtacgtgaaacttccgaacctgaagatgagtgctgcatgaagcaagagactttgtcggatgcggaagtgagtgattgtgattcggacttggacgttaccggtactagtaccccgcctctggattgctctaacaagtcggctgatgaagaggagagccataaagacggaaaagagaagaaacaaaacgaaaagcctccttatagttacaacgcgttaataatgatggcaataaggaacagccccgaaaagcggttaacactcaacggcatttacgaatacataatgaaaaatttcccctattacaaggataacaaacaggggtggcagaactccattaggcacaatctcagtcttaacaaatgcttcgtaaaagtgccgagacactatgacgatcctggaaaaggcaactattggatgttggacccatctgccgaagatgtttttattggtggcaccactggcaaacttagacgacgatccacagctgcctcccgatcacgactagcagcctttaaacgaactctatcattatactcacctcttcaaacctgttatccaggtttctatcctccctcccccgcgcttctggctgcagcatattcccgctataacccctacctccacgctccagctgcgacaaatttcctcccgcgtcccactcccatacaaccccagaacctagggatcaacccttctgcgatggatatgaatacagcgcccttgtttaggccgccgcattccttattcgaaatgtacaataacttacgcttagcagtgcctttgcaatatcccttgcagattcctggattggctggcgtcggcaacttgaatgcgttaagtaatttgaatctcccgtcgtcgagttgttccagcccccaggnnnnnnnnnnnnnnnnnnnnnnnnnnnnnnnnnnnnnnnnnnnnnnnnnnnnnnnnnnnnnnaattgagattttagtgattctgtgattcgtatttaattcgtgtatataatacaggatgtttcatttcaaaatgagctagtcagctacaagatcgcgaaaaaccgataacttaatcgcttatgttactggtaaagtcacgctgcgacgcaacgtttgtcgtaggcttgattccaaataaattaagtataacagttcattttaaatatatgttgtgtttagaacatatgattcaataaaattgtgctttgactaggaaagttttggggtggttctgatttttttcattatatgtggattttgggctgctgaatccgaatatgaggtttgcggacaaaatttcttgccggaacattgaaaaaatcgcgagaaaatcgaaaaatttcagcttttttccgcttttttgctcaaatctcgaaaactattaactcttaatgttgttctgaagctattt

SEQ ID NO: 42 - DNA, 1880 bp, Diabrotica virgifera virgifera
cctcaacttcacagtaaactttgtagaaccaatagaaaaccactattttttggcctcttgctacaaattttcacataacaacacttccaccagtctagttttattttaacacaatattaaacattttaatataccctttcatcaaagcccatatcacctagtaatgtctcatagtttttatccttggatattccttgtaacaataggggttaagtgtccaccatcgaaacaattggtaccgtttcgtatgcgcgattccgacattactcagccacgaaaccagagcagatgccggcgggtccatcccacacaagccaaacttagtccccgcctgcctctatcatcatcctctattccattcgtaagagaagaccacatcctaaacaacacatctttacccacagacgtctctccaacttctacgcgaacagtatcattcaaattttcgacttttgtatataaaatcgtcggccgccccgtttgtatataaacttatactgtatatatacaatatttatgtatacatacagtcgttacgagtatcaaatgtttgtaatataaagacgaaaatttaaattgtttagtttcgaagtgtaaatgtttaatttatcatgaaggagttaacggaaagtgtgcctagtccggttgtgcatcaaaacatcaacattcagcagcatctacaccagctacatttgcaccagaaccacaccagtgtgattttggccaacgagcaaccccagacgtcgcagacgccagaaaccactcaacatgaagctgacactaaacctaccagtacagataaaaagtccgggatacgacggcaagaaaaaccaccatactcctacatagcgctcatagttatggctattcaacattcacctacaaaacggctaactttaagcgaaatctacactttcttacaacaaaggttcccgttctttcgaggctcgtaccaaggatggaagaactcagtgagacacaacctttccttgaacgagtgctttatcaaactacctaaaggtttaggaagaccaggaaaaggacattattggacgatcgaccctgctagtgaattcatgttcgaagaaggctctttccgacgaagaccacgaggatttcgaagaaaatgccaagctatgaaaccacaataccatccaggttcgttcttcaccaataacatggctaacatcgtcaaccaagctacttcctacgatcaccaatcgctgataactcaagattacaacacctgttcgtataatggtactcctcaggttcctagtgtttcggcgtcgcactatggaagttacgagtacccagcttcggtgtaccagcagcaatgtgatagagaatggagtggtgctactggactattgccttcgtattctgatagtaccatttctagtacgtatatgaaagctcctttgagtccgatccaggacgggcaagacgctccgtcgcctgtgttgaatgagaattactacccctatggtggaatcagctcgtcgtcttcagaaaacatgatgaggccaccaagcaactcagtgcagtcagtgcaatgtgatagaaaaccgtacttaagttcccctccaccgtcgattccagcatctcttccctcccctcctgcagctaacacacctcattcgttttacgaggccacagttaaatacagcatgtgaataaagtgagaaacaataacaaagaaagataataagtgagatgttaagaataggaattatctcacaaagaaacacagctaccagagaaattttgtgttaagacaatatttgacatggttttaatattattgatcttgtgtacatagtttttcttcagtttcgtcttcgatagtaagtatatgtgttacagttcaagttgattat

SEQ ID NO: 43 - DNA, 977 bp, Diabrotica virgifera virgifera
gaaagcagaagagttgtcagttgctgtgtttgttcagtgagttactaagtgatatttgaagatgcctaggccgtctagggactcctatggcgaccagaagcctccgtactcttatatatcgttaactgcgatggctatatggaattcacccgaaaaaatgctacccttatcagaaatatacaaatttatcaccgacagatttccatactacagaaaaaacacacagaggtggcagaattccttaaggcacaacttatctttcaacgactgctttataaaaatacctagacaaccagataggcctggaaaaggagcttattgggcactacatcctgctgcttttgatatgttcgtgaatggtagcttactgcggcgaagaaagcgcttcaagttgttaaaaagtgacaaggaaatactggaaaatgagctagcagcccttactaatataaataggatattcttttcaccaccgaatggtcctgtggacgtgaatcctgcagctcatccgacggtagtagcccctcagccttctccgccgattatcacgaagacgcctgagacagcagtcacctgcataaggccgaaaaggtcttttactatagaaagcttaatctctccagacaagcctacgcctgtggttcctagtgctacacatatagtaccccacgttcatccctggatgttatccacgtacgacctatcgtttactaatcccatccccttaatgcctccttctgcagctcattacgaggcctatggactagcttctgctgaagaactatttagagtttcgcagttataagaatttaagtgattttgtatagaagagtttaggagatgtttggaaggaagctgtaactctgtgggagttctaagactgagttgactgttgtaaaaagtacgtacttttgttgtgatctttttttgtataagtatttattttgttggtattataaatgatattaaatttaaaaaaa

SEQ ID NO: 44 - DNA, 1925 bp, Diabrotica virgifera virgifera
acaggctgccagaggtatttgtttttccaatcagtgtaggttttggaatacctaaagtgttaagttgtttgtgaatttgatcgtgatgtaaacaatgaaacaaaaccgacgtttgagatagaatcaattgatagagcggaatcgttgacaaatacgacgagtggaaactattagtgcaataatactttagtgcaatatgttgacgcaaaaactatatcctgacgtaaatacaatgtctacgggaagtaacgcgatgtctcccatgacaacaacgtactccatgaattctatggcgatggcccagatgagttgttccccgcagacttctatgttcggatcgggtatgctgaactcgggaatgacgtccaatatggcaatgaatcgaatggaccagccgatgagtgagcctcctcaattaggatattcaacgataggttcgccgatttctaatatgaatgcttgcatgggtgcgacaatgtcatctattaataactataatgcgactataggccggggcgatttaggtggtggtgatacttcgccgaatagtgcgttacaacgagctagagccgataaaacctacaggagatcttacacacacgcaaaaccgccatactcatacatttctctaatcacaatggcgatacaaaatagcccgcaaaagatgctgacgttatcagagatctaccagtttattatggatttatttccattttacagacaaaaccaacagcgctggcaaaattccatacggcattcgttatcgtttaatgattgtttcatcaaagttcctagaacgcctgacaagcccggaaaaggatctttttggagtttacacccagattcaggtaacatgtttgaaaatggttgttatttgagaaggcaaaaacgatttaaagacgagaagaaagaaatcctcagagcgacgcacaaaagtccttctcatagtgtagacagcagtagcagctcgggtaagaaaactcctgttcaacacggcgaagacaaatctcatcatttagacaaagctaacgaaaacattggatctatgttaagtttgcatcctgcaaaattagacgtcgatcaattgaatcttctaaacgcaaatgatcttcataatatgcagcaacatcaccaccaccaaaatatgtctcacgaagagttatccgctatgataaacagaagtaaccatctagcgttgtccagcgaacaccaagcgatgctgcatcatactccgatgaaccaccacctgaagcaagagcccaccggatacactccatccaatcatccgttctcaataacgaggctacttccagcagaaagcaaatcggacatcaagatgcaatacgacatgcagtacgcgggatacaacaccttgagcccgctgccgaacgctatccattctcatagcaccataggtaatgattattataatagcccttctttataccatagttcttcgggcacgacgtctttgtgacagtatcctttagcttaagcaaagttttctcgaatacactatttgtagttacgtatggacgcggttctgttggataatttatatttttgaggcaagtttttaacaaatttttaaattatttagagtaatctcatatgattagaatatttttaaaagagaatagcgacggggacagtctatctatcagcttctcttatctaaaaagataaaaagctctagaataaacgattaaaaacaatttttttataacatatctcgtagagttgaatgatatttatctgcaacgtacgattgatcaagtattggagtagatatctacgatttatgttataattattttgtaatacattatacgaatatattttttcttttgccgctaaaaaatctgtcaacacaataatgttgtatgggccattccacgaacatacgcctgttttggattgcttcg

SEQ ID NO: 45 - DNA, 501 bp, Diabrotica virgifera virgifera
atgtcctcttctgatggaggtcatgagcgcaaacctcagaaagatgacagtagcgtctttgttagtcccgtatttttcccctctgaggacaacttccatcaattgatcaagacattggacggagctgaagagactatggatatctgcgtctttaccattaccgacgacgacatctctcaggcaatcgttcgagcccatgaacgtggagtccgaattcgtatcatcactgacgatgacaaggccgaggaccaaggttctgacgcgaagcgtttggcaaagaaatacgacattccaattcgcgttgatggaagccctgcgcacatgcatcacaagtttgccgtcctcgacaataagctggtcatgttcgggtcttataattggacaaagggtgcccgcttccagaaccgagaggacttgacgctcacgaactcaggaaaggccgtcgccagtttcaagaacgagtttgagcgactctggaatgagtttgagcaatatgagttg

SEQ ID NO: 46 - DNA, 2350 bp, Diabrotica virgifera virgifera
ctttaatacaccagtggctgataaccattattgccgttagaaaataagaagaatctccggtgacagtgaactgacaactgacgacgttttgacgtttaccataccacaaattttaatattcaaaaaattctaatgaaatgtaaaatacattcatagctaattattatagtttttaatttttatttaaaataaattttggttttcttctagtcaacaaattttaaaagaaatatataaacaataatgtggagattaattcaacaaaatttacataacaaattattattccacaatagtgcaatatttaagaaatatttctgccagggtcatattaaaaattatatctccagaacagtgtcccaaaaaccagttccaaaatcatttataccatcaaaagttgcaacatttggggttacacttactggtggtctaattataaaattgtacatatcacacaatggggtattatgcgaagcaaagaagactcgaatggctggttatgaaaataaatcagacaaaaatgttaaatttgattgggcaaggctatggaagtacttgaaaccacatatttggtacttcttagcagcaattgtgggggcattggctgtggctttattaaatatacaaatacctcaagttataggtggtgtggtgaatgtactagcaaaatttagtgaaagcagggatagtgaattatttcttaatgaaatgaagagacctgttataaagttaatatccatgtatcttgctcagagtgtatgtacatttttctacatctttatgctttcgaatttaggagaacgtatggcatataaaatgaggacagatttatttgaatctatattaaaacaggatatagcattttttgatcagcaaagaacaggtgaaattattaacagattaacagcagatgttcaagactttaaaagtagcttcaaacaaatcgtttctggaggtttgcgagcggccacgcagattgtcggttgttcagtatctttaattatgctatcacctcaaatgacattcatttctctactttgcataccatctgttatagccgtaggaacagttttcggctctctactaagatcagtttcaagaagagctcaagctcaggtagaaaaaacaactgccgtagcggacgaggcggtgagcaatatcagaacagttcgagcgtttgccatggaggaccaagaaaaggaattatttaacacagaagctgatcgagcaatggttttaaatgaggatttgggattaggcattggtttatttcaagctggaaccaatatgtttataaatggtatggtgttatctactttgtacatgggtggttacttactatcaaccaatcagttatctgctggggaagttatggcatatttagtagcatctcaaaccatacaacgctctttggctcaaatatcattactttttggctctgtagtaaggggcgtagcagctggttcgagagttttcgaatacattaataaaactcctaaaatggcatttacaggaggaaaagtattaccatatgaatcagtgaagggggatattgaatttaagaacgtttgttttgcttatccaactagaagtcagcagataattctgcaaggttttaatcttagcgtaccatcaggaaaaacagttgctattgtaggggcgtctggtaatggaaaatcgacagtggtagcacttttagaaagattttatgatgtaaaagatggttcgataacattggatggacacgatataagatcattggatccttcgtggttaagaggtagagtactgggtttaataagccaggaaccagtattgtttggtactacaataatggaaaatattcgctacggcaaacctgatgcttcagatgatgaggtaaaagaagctgcactactggcgaatgcggatgaatttataaccagttttccgaagggctataacacacctgttggtgaaagaggagtgactttatccgggggccagaaacagagaattgccattgcccgtgctcttcttaaaaatccagttgttttacttttggatgaagctacaagtgctttggatacagaatcagaaaaaatagttcagcaagcattggaacgagcacggacaggtagaacggtgatagtgatagctcatagattgtctacaatccagaatgcagatttgattgttgtattaaataaaggaaaaattgtagagatgggtactcatgaatcgctgaagaaactgggaggctactattggtcattagcataccaacaacaaaacagtccagctggataatctatttgttaatattgtaaataagtttgtataatataaataaatagtctaggcgccaaag

SEQ ID NO: 47 - DNA, 1472 bp, Diabrotica virgifera virgifera
ccttatctctccaacaacatccaattcgtcaaactcgaatcttatcagctccccaactaatcaagcgactatttaactcccacttaaacaccaagcacaagaacacattccatgtttattttaaaccatcagcagatacacgacaattaacagaagctacggacgcacaagataccggcatccggtgatattgaaagccatactatctattttttttaaaccactttcaatatcaccggacgcacaagataccggcatccggtgatattgaaagtggtttaaaaaaaatagataatatggctttcaagctggtggtgggcgccacggccttgatggccttttctcttctgagccagagcgtagaagccgctcagctgcagggagtagcaagaaataactccagaagaggtatctgtaccttggaagttcctactattgacctaattcctgcagaagacagacatggcgttatacctagaggaaatggatccagaaacggatacagtaaaatagatgtgtgctgtagtggatacgaaagagttccaagaacccacttgcaatgtgagcctgtctgtgatcactgcgaaaatggtaactgcacgtctcctggtcattgcgaatgcaagcgaggatggatccatgatccctaccataaagactgcattcctacttgcccagaaaggtgtctcaatggtgtctgcaccatcactggccaatgctcctgcaatgccggaaacacactcagctctagcggaaaatactgccttcctcactgtagcggaggctgtggtgttggaggaaactgcgtaggtcctgagacctgtgcttgtgacaaaggtttctctttggatgcaagaacccgcaaatgcaactaccattgcgaaggaggctgtggagaaggaagctgcattggaccgaaccaatgttcctgcaaaccaggatatagacaagctggacactcttgtgtagcagattgcccaagaggatgccacaatggagactgtgtagcaccaaacagatgttcttgtaaagctggatgggctttggatggtactggaaccgtttgtactcctcactgcaataatccatgcctgaatggtgactgtgttgcccctaatcagtgcaaatgtaaagaaggttacattgaagctccaaactccattagaagccagacctgcgtagcccattgcccaggaggttgccctaacggctcttgtacagcccccaatttctgtatttgtaaccctggctacgtaaaggaacgcaaaggaagcaacaactgtgttagaagagtcagaagatcattgatgcacatggagttgatccctgaagcagttttagaaggactgtaaactgttagtttgtatatttgtttgtgacgatgttttttactctaaattttgagattttataaatttttatgtattctaaaatatgagacttttaataaagttataaggaagttaaaaaaa

SEQ ID NO: 48 - DNA, 2594 bp, Diabrotica virgifera virgifera
tttgtatcatggccgacgactggccaagtcaccgtttttgcaaactctagataaaataagtattttttttgaaactttttaggaacattgtttaaactaattgcaacaaaatggagaacttctttccgagtatgtggaaggtccgcgagttggctgataaagttacgaacgtagtaatgaactatacagaagtggaagcgaaagttcgagaagccacaaatgaagaaccttggggacctacaggacaaataatgcaagaattagctcattccactttcacatacgaacattttccagaagttatgtctatgctttggaaacgaatgcttcaagataacaaacaacattggaggagaacatacaagtcattactcgttctaaactacctaataaaaaatggttcagaaagagtagtcacatcagcaagagaacatatctatgatcttagatctttggaaaattacacattcatagatgatataggaaaagatcaaggagttaacattagacataaagtaaaagaacttatcgattttatacaagatgatgatcgcctaagagaagaaaggaaaaaggccaaaaagaataaggataagtttattggaatgagttcggatacatttggaaacaaatttggtggccgtgatacctgggacgaacgaccctacacaagagaatcagaagattgggacgacacgtccaactcaactaaccgctacagggataaatcgtacgaagaagactacgatgtcgagaaagaagacagcgattcggagtctaaaaataatagttacaataatagtattaaaaaatatcaagatacggagctatcacaaagtccggtgcacgtcgacaaacgcgtcaatattaatattaacacttctttgaacaattcacctaagaaaacgatcaaacagataaagaaggtcgatctgggtgctgcagctaacttcggaagagatgcgagtcagagtcctctacctccaacaggaagtaacttgctaaacgatgactttgaccccagagctaacgaaccaccaaacgacgtcaaggtatcgtctgaattcggagattttgagactgcttttggaggatctacggattctccccaaaaagaagataatttcgccgatttcagctccgccttctctaaaccaccaagccaaaacgcatcacaatactctgctataccaaatttgctgggaaccactccggactcaactcccgcattaaataattctaatttactcctcggtaactctcctccccaaaatttgttagcaggacctccttccaatttcggtgctagtacctttgcgcccgtttcgaatttgcctccaactccagctccgatgtccactccacaaagcaatagtgatttattaggcgatttagactttggatctctcagtatggaacctactccaattaatgttcagagtaacaataattatggattgctagcaaacaacactaacgactttatgagcgcaggttctgtgctaactcctacttcaattcaaccactccaaccaatgtcttccacaaccaataataacaatacagacaaaccgacaataaataaaaatttaccagtcggtagcacgtggaaaaattccggtaatatcaacatagacttggacaatttactaaccaataaaccaaaaacaggccctaaagattctataaaacgaaaccaaaatgttttaatatctgacaaagatggtgattctctaactctagagaaagagaaacataatgtacaaattaaaccagagctggaagaatgtatacttgaaagtaatgacacggaggattctttattagactcgtattgtttagacgatgttaaaatagaagaacacatgttacaatgtgaaataagtagcccattccctatcgttagcaagcaagaagttaagacagaaatcaaaagtgaactaaatgaatataatttggaagtaaatcatggctgtgaatctcgatttaaaagtaggaatacgaaagaattagactcagacaaagatgtaaaattacagataggagcttcaactgagatgcatcatggagaacattgcagaagtatggaaacatcaaaattactttccaacattggcaaacaaagtttacgtcataacgaggttaaaatgaaatcagaaagaacgttggtaattcacactggagaaaagcgttataaatgcgaaatttgttctaagaaatttagtcaaaatggaaatttaaaaagtcatttaaggttacacactggagagaagccttataagtgtgaaatttgttataagcagtttaatgaagcaggatctttgagaaagcatttaagggtacatactggggaaaaaccttataagtgtgaaatttgttttaaacgatttattgaagcaggacatttgaaaagacatttgaaaatacacactggacataagccttacaagtgtgaaatttgttctaagcaatttattctacacgggcatttaaaaacgcatttaaggatacacagtggggatatgccatataaatgtgaaatttgttttaaacaatttattctacacgggcatttaaaaacgcatttaaggata

SEQ ID NO: 49 - DNA, 2094 bp, Diabrotica virgifera virgifera
cttttattacctatatttaaatcaggcaaatatcaggagttcaaaacgtcatcgaaagaactacgacgctgggcaggggacttagctagaacacaagatagacggtggacaagaataatcatgggatggaggcccagaaactataaaagaagctgaggacgaccaccgactagatgacatcaaaagagtattaggaaactgactacaagcagtgtagagaacactggaaagaactgaggaaatatgcataatatatgtccacctatagaaatacaaaatgggttagctagaagaagagctaggggaagagtagccaaatttttttgtgtaagagggtttttattggctggggaaaaactcagtacatgtactcgtggtaaatgggatccagaaattccaagatgtgtacgtccaacgtgcaagactctatctcaacaaaacactaatgggaacattttaatttatccaactcatagtggagcagttcaacatttcttctgtaaagctggtaactatttaaacggccctagagatatttattgcaacggttcaatatggagtaacaatgtacctacctgtataactaataatcaaaagccaccactaagttgtaattttgaggatttggatatttgtggttggactcatgatccaaaccatgattttgattggaaaagagaaaattataacacacccagtggatcaattgggaccggaccaagttttgatcataccaaaggaaggggccaagatggttactacatgtatattgagtcatcatcaaagtctgaaaatgacagtgccagattgatttccccagtatatgatgttcgtagtgatgatctttgctttaaattttattaccacatgtttggagctacaataggaactcttcgggtatatttaaaaacaataaatgaaagttggaaattaaatccggaatcagctttcttttcaaagagtaaaaatcaaggagacaagtggtatcgaagtctgactcaccttgggagtgttaccgaacaatttcaaataatcattgagggtgtcagaggtaatgggtatgtaagtgatatagctatagatgatgtagaaattattccaaattgtgaaaatgaagaagaatctacgacaagcatgtatagtagtactgataatgaaatgtttccaataatagatacgtgtgaagatcgctgtggacaaaaagaaaatataacagaattgtatcatttgacgtgcgactgtgatgatgattgctttattagtaacagatgttgtcctgatttttatgacacgtgtatagatacgacttgggatacgactcctcctatagataaatctgaaacagagggttctttaactacagccaaagaggcaaccacggcgaatcatttaacaaaaagtgtgtatacaactcaaacaagacgtccagttactacagtagctccaagaactactaccagatttatgcatgtaatacgttttaacacaccacctgtaactcctcgaatattcagaagaacaaccactaccacactagttcctccacttcctccttctacaactcgttctaatagaactacagttacaactcctacttcttcagtcacagaacataaagacgacgtacttgaagtaccgagacctacaaatatcgacgaattactctatgacgctataagtggctctaaagaattttggtcagatgaagtagaaaatgccatagatgctccaagcacgagaaatttcagtgaaagcaacaagcttttcagtcaggtcagacaagcagagacgagttcgcatttagtaatcgtatcattaagtgtttgtgctgctgtagtgttaatttctgttgtaagtttcgtagttataaggagatatatatattctagaaatgttctgcaatcttcaaatggtgaaagtcaaagtgacgtgcgatatttgacaaattctgatgttcttgatctttccttagctaatgtttatgatgaattattaaactaacttatttatttatttacgtatattatacaatttttaaaatttgttaacttgtttcaaaataaaaataatatctaggtacatgttgaagttgtg

SEQ ID NO: 50 - DNA, 3243 bp, Diabrotica virgifera virgifera
  misc_feature (3023)..(3024): n is a, c, g, or t
gatgaagagtacgacatagcgttaaaaggtgctgttatgaaatttgatatcaccatgaaaaatttgcaatggattctgcttgcagtttgttttggtttaataaattgtaaatcaactaataatctgacaattgaacaacagcttttaaccaatggaagtcccatcacaaatcaacttaacgcaaacaaacaaattattttattatatcgaaactttacgtcgataaacccctacaggataatcacatcttccgagaatgccaagaaggaatttcccgttttgattgttgctgaacagagaactcaagtgacagcatggtctattccgatgcttatcgaatcgactaaaccaggagtagaatactcttataatatgtcctctaaaacattgtgccatgattatatgaacgttataattctttctccaggaatgatgatagtacgccctttatatttccaacaaaatttcatagtggcattgtcaacggcgagcacaactgatgtaaacgtaactgtggaattgaaagaagagccggatttttacctaatacaagataaaccgtataacatgacggtgggacccagtgagccaagatatgcttatttcagattcgaaaaggacactgctgacacggtcgtcatcgaagtagattcagaagacgaactctgtcttacaatttctgtccaggacagcaagtgcccggtttttgacaataacaaagatgtaaaatatgagggcatccatcaaacaatcaatacaaaaggtgctattactttattgaaacgcagttacaaagatggattcttccttgttttcgtcgcgaaaccagatacctatgactgcagtcaggaaagctcaaatctaccgagactgacaagaaccgtttccatagagcagatggttcgcacacatgttaactttattatcagaaatagcattacagcaaatgattacactatcgctgtaggtgctacatttttaatattaatcggttccggtatcctggtgactgtagctgcgcttatcttccataggtatgggaccattgctagaaataagtacgaagatgtcatagtatcggactattttgaagctttgtctgaagaacagatcagctcattgctgaggaaacttgatctacatgtgtccgaattatcaagacatcctaatagaatcaaaaaaaggtcttacaactatttgtatcatacgttgagtatcgccatattttacagcatacctgtagttcagctagttttcacctaccagaggatcgttaatcgcactggagatgaagacatgtgttactataacttcctatgcgcacatcctgcctttcgtttcagcgacttcaatcatattttctccaatatcggctacgttattttcggcatcattttcatttgtgtagttgctgacaggcatagaataatcaagttgagaaaggacaaaggaataccagtgcattatggaatatttcatgctatgggcgtggctttaattattgaagggttgttgtcagcatgttaccatatttgcccgagtcagtccaattatcaattcgatacaagttttatgtacattatggcagttttatgcatggtaaagttataccagaaccgtcatccagatattaatgccactgcgtacacaacgtttactgttttgggatgtgccatatttatggctatgattggaattttgaacggaaacttagccatctggatcatcttcgtagtatgctacacgttgctctgtttatttttatcattaaaaatttatttccttaactacgtcgtcgatggattaaatcagtttcgaagttccgtcaccaagaaaggttttactcaacacgcacttaaacctatacggaaagctagatttataatactgctgatagcgaatatagcgaattattcaatgttgatttgtgggctcttgttgtatagcgacaacgtcactgactttggaactttcttgttagcgttattgatgggtaacagcgtcattcattgtgtgttttatacgtgtatgaagctgataagcaaagaaaaaatttgttatgaagcaattctgtatggggttctcgcaatagtgtgttggggttcatcaagtgtatttttcttagatgcagcaactttatggacggtcacacctgcagaatctcgtcaatggaaccaagaatgtatagtcttcaagttcttcgataaacacgatatttggcacctactgagtgccccagctctctattttacttttatgtatttgatgtctttggacgatgacatacttgatgtagaacaaagagatctacaagtattctagattatgggtttaaatttgcagaagaatactgttctaaaccaatattaatttgatatattggtatttgtaggatttaataaactaaaacaggattgacttttgacctattgtggatgttaagacagtgtacctttatcgctgtaatttgaccgattttgatctataccgatttattggtgaggtctatttgtaccgatgtaataacttaagactatcaatcagtcagcaacgaaactcctcttgtgccttctacacttatctgttcgttgctagttgttgtcaatatctcacattctgactttgatgttatttagctacatttctccaataaacaatatttcttgtccaactttcattcttgtcatgccatgtatcatacccagttcattttaaatcaattaaaattaaaattaatttcaacaaatttaatcgattacattttccacaatgtttccctttcttatatctttatttgttacgttgcggtcttggagaaactaccaacagtgcttgctctcgatgtatgaatcaatatttacaatcaaaatgtatttcaacaggttctatccttgaaaaatttgacaatcttctctctttttaatatatgattcctatatcatctgtagaatttattttgtgcatttctgttgcattcgagaaatccaaaaagtgaatattatacagggtgttgtatttgaaannaatatacagggtgttgtatttgaaataacaaagtggattggccacctccgtctacccaacagacggagtggtcacctgaatgaatcacaatgtttcttcaaaataccttaacgcacgaccttctacgcaataccgataacaaggtattcggtcattggtattatcagcattgtgtacaaggccgtgcgttgaggtattttgaagaaatattgtgattta

SEQ ID NO: 51 - DNA, 3296 bp, Diabrotica virgifera virgifera
gaggaataagtgcttaacttcaggtttattttcctagaattttcttatcaaatcaaaaatcaaatagggtattccaggcatatgcactggagttttggagtctagttttcatttttcattctacacaaatattttgtagtgtgttgattgtgatagtgtagtggtagtgcttcgaaataaaattttgctgacatgttggtcagttaatgcacagaacaaatatacacctatttacaaaaatttcacttatggatcaaataatacaatgaatgctaatcaatatctggaatatattttggaattctcgaaagattatgacgacccagaaatttacttgcctccaagaatttggattcaaagtgatgcagatgttaccgcccccttgatgattgtagcaagacagaaaaaagaaatgatttcttggcagctgcccctagaaatagaaggcacaaatggcgaaacaaatgaaaattatacatctagaactatgtgccatgatattattaaacaatatagatttgcaggaagtaaacagaaattaaaacaagagaatgtcattgtttctgttactacctcatcagtaaccaatgtaagcttcactataagggtagacaatcaaaaggattttactctggaattaaataaagaaatagagtttgacattactccaagcggaccaagatactttttctacaatttcactagcaatgatacgttgttgagcaaaggagactccaattatgaaaccgtaattctggaagtgacctcagaggatgacatttgcatgactgtcagtatacaaaacatcagttgtccagtgtttgatacaaaccaagatgttacttttagaggcttttacgaaactgttaatagaaaaggagggatgaatataccgaaatataaattccctcatggattttatgtcgtctttgtagctaagcctgatgattatgcctgtgataagggttccggaaatttagacgccgttacaaatccagatcgactgaaaagcattaagttagtaattaagccaagtattacctactctgattatgtcaaagctgtgctttttactttgggatctgtaggagcattttacataatattcggacttccgtacttcatatactcggtgaaaaaatctctgcctagggaaatggcgtatgttgatggtaacttcccaacaactcccagtgcaaaaatgacctccgtacagcgcaccgtttcggccgttagtggcccttcagtggacatggccgacttcgataccttggccgaggtggacaccgatagggacctgaggttgggtaggggagagccttatttggtggatttggcgaggaagcatcccaaagagttgacgaggaaatcgtatttgtatctgtacaatgttgtcaccgttgccattttctacgctttaccagtgatacagttggtcatcacttatcaaagggttttgaatgagacgggccaacaagacttgtgttattacaatttcttatgtgcacatccattaggtgtactgggagatttcaaccacgtgttttcgaacataggatatgtcctattgggagttctattcctaataattacctacttaagagaactttcgcacaaagacgatgatttcgaccggcaatttggcattccccaacattatggattgttttacgccatgggtgtggccttgatcatggagggtgttttgagcgcaagttaccatgtctgtcccaacttcttgaacttccaatttgattcgagctttatgtacgtcatggcagtgcttgttatggtaaagttgtaccaaaatcgacatccagatataaacgccaacgcttacactacatttggagtactagcagttgctgtcgtcttagctatgattggactactcgaaggaaatgtctatttttggacaatattcgtgattatgcacatcctgatgtgcttctacttaagcgttaaggtctactacatgggatgctggagtgtgcgagatatatcgatgcagaagttccgtcaagtttggatctacgatttttggtctggaccagtaaatgtcataaaaccgtgccataaagctagattcgtgcttctcttcttgggcaacttgtgcaattggggcttggctatcttcgccatctataaacttcctaagaactttccagtcttccttttggctatatttatggccaatactctcctctatttcgtcttctatatcgtcatgaagtacattaacaaagaacatgtaagaattttaacgtggatcttcctttttatgtcaacgttgtgtgcagtatctgccatgtggttcttcttacataaagcaatatcttggaagaaaacggcggcacaatcgagacaattcaacgtagaatgcaagctgttccatttctacgactcccatgacatttggcactttctaagtgctacagggatgtttttcacgttcatggtgttactaacactcgatgacgacttatcgcatacgcaccattcgcaaattccagtattttagagcatctacggatgaaaaactagtctgaaagtatttttattgatatgagtatatgaacatataaaggttgccttaaaggttacatcgaagtcgtgcaggaagttaaactgtttttgtaccctctactactatattttacagctcccggaacgaaccatggccggtgacaaacgctgtcgtcggtcgtacacccacttaatctttacgcagacagggtttctatgaccggccatggttcgctccgggagccgtagtcttctttcggtcttgtgtcgtttcaggcattggcagattccgtaatatcaaactacaacactcttcagctacagctataataaattttattgttaattgtgctatctttactggttatattggtcagatgttggtgtcttagttatttttcgtcggcgtatcgtataagatgaaacatattccattctagaacgaccagttaataaccatggtgtaaacttaccactaaaaattccaatatcaacatctcgccatgattttgggagataatttttttatactttttatttagtagatatacaattgcattattatacaaaaataaccaatttttatacagttattaatgaataaaaagtaggatattcgcccaaatccggttcagataggtgtacagtacgtccaggatagcagtagacgtgagctatttataagttcagttaatatgaattctttgtactgaaaaaataatcaagctgttttgatcaaactataatttccgtatactttgagtaatcca

SEQ ID NO: 52 - DNA, 2489 bp, Diabrotica virgifera virgifera
gcgcatacgcccgctaacggtttttttgaaaaattttcattattctgaatttttttttatttaaataaagagtaattatttcagaaaggcatgtttaatattaatatgtgcttggcatatggggcaattttttttatttatacatgggcagtcaacctgttaaagatgaacacgaacatgaagatcaggcacaggatcaggcatgttcgagtgataaagaagatcttggaagccaccatagacttaattcacatagaaccagcatactttctgatcaccaagaagaaatgactgagtattggttgatatctgccccaggggataagacctgtcaacagacatgggacacgatgaataatatgacaagtaaacagaataatttgtcaaccaactacaagtttcaaatcccggacttgaaagttggtactctggatcagttagtaggactttctgatgatctgggcaagcttgatgggttcgtggagcaggttaccaggaaggtagctcagtaccttggagaagtacttgaagaacagagggacaagtggtcagaaaacctgcaggccaataacagcgatttgcccacttatttaacccgatttacttgggacatcgccaaatatcccatcaagcaatcgctccgtaacatcgccgatataatcagcaaacaagttggccaaattgacgctgatctgaagaccaaatcgtctgcgtacaataacttgaaaggaagtcttcagaatttggagaagaaacagacaggaagtttactaacaagaaacttggcagatttggtgaaaaaggaacattttattttggattctgaatatttgcagacattgttggttattgttccaaaagcccaattcaacgaatggaatgcgacatacgaaaagattaccgacatgatagtccctcgttcttcacaactgattaaacaggataacgaatacggtctatatactgtatccctattcaaaaaggtcgtcgaagaattcaagttacacgctagagaaaagaagttcatcgttcgtgatttcatatataacgaagaggaactggcagctggaaagaacgagataaccaaactcgtcaccgataaaaagaagcaatttggtccattagttagatggcttaaagtcaacttcagcgagtgtttctgcgcctggattcacgttaaagcgttgagggtatttgttgaatctgttttaagatatggcctccccgtcaatttccaagctattttaatccaccccaataagaaacaattaaaacgtttaagagatgtcttgaaccaactttacggccacctcgatagtagtgctgccctttcaggacctaacgttgatagcgttgacattccaggcctcggattcggccaatcagagtattacccatacgtttactacaagctgaacgtcgacatgttagaatcgaagatctaaactcacgcatcaatccaagagtttgttattaataggttccaaacaattttaaaaaaacgtactacagatacaaatagtatatttttgattactcactctttcgaggggctgttttaatgtcggtatttttaagttttgtccttactcaatgtccatttagtaccccgtcattgtatgtaaattaattaaaaatgcgcaacaaaaaatgtagaacttttttttattttaaaatgcatttaaaattcgtttaacgatgatataattgctttaatgtatcatgtaatactccgattgaacatataaatcgttattaatattatttcttgttgataacacaaaagagaccatgttgttagaaattgcattcgaaaaattaaaaaaatgatagatattatgacgcgtagatgagctgacaagtgacgtgttaagatgtattgatatctaaacatgaaatttcaacaaaccatctatgttatagatgtacatatgtttcgtaaaattgacgaaaagctggaaatagattacatataatttgtcataaaatatttgcgtcagagacttgaggttgtgatacaatatatatttactcctacagaatatttgttgaatattaccgacaccattaaaataccttatccgttatgattgtagataaataatttactctgaatttaatacaaaacgatgtcataatttcaattgtacttgttctaataatataactacttatcgaaaaagaatagaaatttattataaaattgtgtgaaatgactgggtattataggattgccccaacaaaatattttagatgtagtatgatgcttcatcagtgacaatatatttgacgtgttttattatgggccactctttaatgtaaaccagtattgatttattgtaaataaatattgtatatatactacaaaccaataaaatattttgccttttgaatctatttataaaagatgattccatattgtaatatagttcaattagttgactactttttttgaatttatttcagaaataattttaagtggttatttg

SEQ ID NO: 53 - DNA, 1502 bp, Diabrotica virgifera virgifera
tttgacatagctcgttgtttgcttttcattgtggcgtttgcaaacttttttaatttattaaagtgtattaataagtataaaacgaaatagtagcctaaaaatgggggataaagcggatgccgagacgtttgatgatgcagttgaagagagagtaattaacgaagaatataaaatatggaaaaaaaatacaccctttctgtacgatctagtgatgacccatgctctagagtggccctctttgactgcccagtggttaccagacgtcactagaccagaaggaaaggatcattctattcacagacttattttgggaacacatacgtcggatgaacaaaatcatcttttaatagccagtgttcaattacccaatgaagatgcacaatttgacgcttcccattatgataacgaaaaaggagaatttggtggatttggttcagtttctggtaaaattgaaatcgaaataaaaatcaatcatgaaggagaagtgaatagagctcggtatatgcctcaaaatccatgtgtcattgccaccaaaacaccatcaagcgatgttcttgtctttgattacacaaaacacccaagtaagcctgatccaagtggagaatgccatcctgatcttagattaagaggtcatcaaaaagaaggttatggattatcatggaatccaaatctaaatgggtatttgttatctgctagtgatgatcacaccatatgtctatgggatattaacgctacacctaaagaaaatcgtataatcgatgccaaaactgtttttactggtcatactgctgttgtggaagatgtagcttggcatttactacacgaaagtctatttggttctgtagctgatgatcagaaactgatgatttgggatactagatgtaataacaccagtaaaccatctcacactgttgatgctcacacagctgaagtgaattgcttaagctttaatccatattcagaattcattttggcgactggtagtgctgataagactgtagcattatgggatttaagaaacttaaaacttaaattacatagttttgaatctcataaagatgaaatcttccaagtacagtggtctcctcacaacgaaaccattttggcatcatcaggaactgatcgcagacttcatgtttgggatttaagtaaaattggagaagaacaaagtcctgaagattccgaagatggtccaccagaactcctcttcattcatggaggacacactgcaaaaatatctgatttcagttggaaccctaacgaaccatgggttatatgctctgtatctgaagataacattatgcaagtctggcaaatggctgagaatatttataatgatgaagaaccagagcagcaagcatcagatattgaggctacagccagttaagaagatcacagttctggagctgtgtattgtttatttaattgatagtactaaaaaaaaatttgtattctacactttaaatttgtaataaaccataaaataagtcagtgactttaaa

SEQ ID NO: 54 - DNA, 3101 bp, Diabrotica virgifera virgifera
gtgacccctctggcgcctagactacttgaaattgagttatttttattttatttttatttatactatcttatcacacaagaatatcttttcagcagtcattaagaaattgatcatcatggatgataaggatttgctgaatagtgaaaatatatcggaagatactcatgtactaaatcacttagaaaatggagcttatctttcttcaaataacatccccgtaagtgaagtagtcgagaaggtttcagagttttccaattttctcaacagcaaaggaagattgtctttacttcatgcaaacccagcggaatcccaagaattggtgcctttaatgttgtcagtaaaaaagaatatcaaaagtgcattatcagaaatcggtcaatcacaaataaaaaaaatccgcagttacgtttgtccaaaatgcgacgaaacaattaaagttcctccctacgtcgataactggacatactttcaagatcatgaacattttgaagagttatatgtaagctttttggaaggatcattgactatttcgacagctatggagattgaaccaagagctagtaccagtggagaatatttggaggaaagcgatttgttggataatgaacacacagatagcggtattgattatgaagaaggcatacgtgaaactttatcggaagatgaggaagaacctcttggaagcaatacattcaggtttaactttaaaccccaatatgatcctgtcgtcgaatcaacgctgtatccggattcgttcaaatcgttaaaaaaattcgacagttgccaatatctgtgcatacaaaaagttaattcatacagagccttctgtcttctatgttgctgtgatttggttacgaaaaatgctgcaaagagaatttcagtaaaacattgtattaatcatgtcttgggccaacgtcataccaaggcgtgcagcgatgaactttgtgcgggatcattggaaaagtatcatcagttgttttataatttggaactcccttatcaagctcaccaggtatacttcacaccaaaaacacttggctctctcgagtgtcgactatgctgtacaaccgtacaacacaaaaatttaattgagcacgtacaggggagaatgcataagaatatcatattggatttatttaagagtcaaaagttatctgaatattatttgatggaacaccatttaagtatgtacggaataaatactgataaattaaaaccgaaagattctccagcaaaagataatcctgagaaaaaacctagggaacgaagggagaaaagcaaatcgacttcaggaaatgaagccgcggccgaagttgagcatatgtttgtacggacttttccctttcctccaacgggcaccccagcagattttattccaaacagatacgccgaacatattaaatactttaaggataaggacacacattttggttgtgaggcatgtaatgtttacattaaaatggacagagccgatgtgaagaaccacattttgtcagaacgccatcagaaatcttctcaaattaagacgccaaagtataaatatttatgcgaaccttgcagtgtacacctgagagacgaaaatgattgggacaaacatttcaaaaaacctgaacaacgacattccaaacaaccacaaagtcgactggataagtttgctgagtacgagtgcactacttgtaagtacgtaatatttggcgatgagatatccacaacgaggcataaagttaaagcaggaggaaaaagagaaaagccctccgaacccaaactcactgacgaaattaaaaacttgttcaaaagtacggaagatattgaagaggaatgtgagcggttgatggctaacaatgccttaatgtctttacagaaaactaaggattgtaccaaacggatagaagaagtgctattaaccgttctagctgagtgcaaagcttatccttttggttcaagagaatctggacttggaaatgataaaagtgacttggatttatatattgatgtaggaggtatgtattatggagccaagaatcaagatgctttatttcaagcgcacattgtaaaacaagttgagagtattctaagcaaacatagaactgaattttcaagaatcgttacggtacctggagctagaacccccattgttaaagtccatcatatttccacggggatcgactgcgatctatctttcaggcatggattgagcgttgaaaatactaaatttttaaagaaatgtttggaaattcaaccgattacccaaccgttcatcttgatcttgaagaaatggttacagtttacccaaatgtcagagcatgtaacgacttatgcattggcaatgttggtgatattttatttgcaagtaaatggatacttgttatccgttgaaaaactcaatgcattaaatccactaccggctccagttattagtggatggaaaactatcaaatatacagcgtctctagagcttttgaagagtaaagttactcagtatagtggttcagttgtacctcttttaaaagggttcttcaagtattatgcttcatttaactattttgatgatgcagtttgtccgttgttgggacataccatccaaagaaaattgttccaggatcccagaaggctaccgccagaaatgaaatcttatgtaaagcaactgcgagaaaaggagcccgaacaatttagatacctgtctccattttgtattcaggatccgttcgatctaagtcataaccttaccaaagcttgtcaaggagtcagtcttactgtgtttaaaaagtattgtaccttgactcatgaatatttgagcaaattagaataaggttttatcaaatactatagatagactataatacatacaactcttgacaaaaaaaaaaaaaaaaaaacaagtaaaaaaaaaaaaaaaaaaaacaaaaaaaaaaaaaaaaaaaaaaaaaaaaaaaaaaaaacccacaaagaaacagctcattataaaaatgccacaaggaatagcctcagaacaaatatctgttggtgcaaccaggcattaattactcaaagttgtttatttttatacaaacaatccgccatctagcggtagtagttgataaccacaaactatgcatttaaaa

SEQ ID NO: 55 - DNA, 1578 bp, Diabrotica virgifera virgifera
gcaggatcgggatcgaacgaaatgacgaaatgttgcacgtagtgttacagttttaatgagttaattgatatatcttattaaaaaataatgtcagacagcgattcatcaagtccagaaaatggcaatgaaagcggtagcgctactcaagaagctgtagaacaacctgagcaggcccaagtggcttggaaagatttgggtcttgtacaatgaaagcggtagcgctactaaagaagctgtagaacaaccagagcaggcccaagtggcttggaaagatttgggtcttgtagatgcgctttgtaaagcatgtgaacagttaaaatggaaagaaccatcgaatatacaaaaggaggcgatacctgtagcgttgcaaggaaaagatatcattggattagctgagacaggttcgggcaaaacggctgcctttgctttacccatacttcaggcgcttttggagaacccccagagatattttgcactgattttaacacctaccagggaattagcatttcaaatatctgaacagtttgaagccttaggctcaagcataggtgtaaaatgtgcagttatagttggaggaatggacatgatgtcccaagcactgatcctagccaaaaaacctcacattctaatagcaactcctggccgactgctcgaccatttggaaaacacaaaagggttcagtctcagagccctaaaattcctcgtgatggatgaggctgacagaattttgaacatggatttcgaagttgaagtggataagattttaaaagtaattcccagggagaggagaacgtttttgttttcggctacaatgacacaaaaggttaagaaattacagagggcctgtctgcaggatcctgttagagttgaggtctccactaaatatcaaactgtagagaagctgcagcagtattatattttcattcctgtcaaatttaaggatgtctacttggtgaacattttgaatgagttggccggtaatagttttatgattttctgttctacctgtaataataccatcagaacagcactaatgttaagaaatctgggattaactgctgtccctctgcatggtcaaatgtcccagaataaaagattggctgcgttaacaaagtttaaggcgaaaaatcgatctattttgatatctacggatgtggccagcaggggattagatataccacacgtagatgtagttatcaactttgacataccaacacacagtaaggattatattcacagagtgggaagaacagcacgagctggaagatctggtagggctgtgacttttgttactcagtacgatgttgaattgtatcagcgaatagagcaactgataggaaagcaactaccgttatacaaaactgaagaagatgaagttatggtattgcaagagagagttgctgaagcacagagaattgccaaaatggaaatgaaagatttaacagacaagaagggaggcaagagaaagaagggaggtgatgatgatgacacagaagaagcgacaggtgtaaggaagaggttaaaaggtaaaggtggcaaacaaaagaaaactggaagaaagaagtaaatttagtatgt

SEQ ID NO: 56 - DNA, 1775 bp, Diabrotica virgifera virgifera
agttgttaaaacagatataaacagatcatgaatacatataacaataatttctttacccaaaaatgtgaaagtaagtaactgatccgtggttcataatgaatctttttccatctctattttgatagaagggttgtctggttgtgtcaagtcaaatgtcattgtcaaggtagttgatttttgagctgcgtgtgtaaaagaaatatgtacaacagtggatttttattaaaactcgagttataataacacaattaccccatttttgcaagcagtgaagtaatacatttaccgaaatataaaagttctaccaaaattgtgatataaatacaaagaatcttgcaagtatggcagttccaaaaagaggtgcctcagtttttgaggacttatcaaatgtagagtttgaaactagtgaagatgtcgaagttatcgagaagtttaaaaacatgaaccttaaagaagaacttcttcgtggtatcttcgcatatggcttcgaaaaaccctcagccattcaacagagagcaataaagcctattatgaaaggaagagatgtaatagctcaggcacaatctggtactggtaaaacagctaccttttccatttcgattttacaagctttagatttgacaatgcgagaaacgcaagttttatgcttgtctcctactagagaattggctgtacagattcaaaaagttattctagctttaggtgacttcatgaatgttcaatgtcatgcttgtattggaggcacaaatcttggggaagatattagaaaacttgattatggacagcatgtcgttagtggaacacctggaagagtttatgatatgatcagaagaagagctctaagaacaagatctgtaaaaatgttggttttagatgaggctgatgaaatgttaaataaaggattcaaagaacaaatttatgatgtctacagattccttcccccatcaacacaagttgtactcatttcagctacactgcctcacgaaattttggaaattacttccaaatttatgacagatcctattaggattttggtaaaacgtgatgaattgacattggagggtataaaacagttctttgtggctgtggaaagggaagaatggaaatttgacaccctctgtgacctctacgatacattaaccattacacaggctgttattttctgcaacacaaagaggaaggtagactggctgacggagaaaatgagggaaaacaattttacagttagttcaatgcacggagatatgccacaaaaggaacgtgacaatattatgaaagagtttaggtcaggacagagtagggtcctaatcacaactgatgtttgggctagaggtatcgacgtacaacaagtcagtttggttatcaattatgacttgccgaacaatcgtgaattgtacatccatcgtatcggtagatctggtaggttcggccgaaagggtgtagccatcaatttcgtaaaatcagacgatatcagaattctaagagatatcgaacaatattactcgacccaaattgacgaaatgccaatgaacgttgcggacttaatttaattttttcttatttatttttatactgatactattacattatcagtagatacagtttatcctaaaccctattttcagtcattaattttgacgtcagatacgattttaataatgtcgcgaatcacatgcatacatgaatgacataaatgaatacatgacatgaatacataattttcgaaattctatgtataataatcacggacgtacgttcttttcctcacatcgagc

SEQ ID NO: 57 - DNA, 1494 bp, Diabrotica virgifera virgifera
gtcacgtcacgtgtcacgtatctgacgtatcaacaattttcgcatctttctgtctgttcccggcgttctttgaaaaagttttcaataatactctaaaaaatggcagacgctgatgatctattagattatgaagatgaggaacagacagaacaaaccgcaactgaaacggcaactacagaggtacagaaaaagggtgtcaagggcacatatgtatcaatacacagttctgggtttagagattttctgttaaaaccagcaattctcagagctatagtggactgcgggttcgaacatccttcagaagttcaacatgaatgtattcctcaagctgtcattggcatggatattctgtgccaagctaaatccggtatgggaaaaacggctgtttttgtattagctacactccaagtaatagatcctacagaaaatgttgtatatgttctcgtcatgtgccataccagagagttagccttccagataagcaaagagtacgaacgtttcagtaaatatatgcccaatattaaagtaggggtcttctttggtggcttgcctatccagaaagatgaggaaacgttaaaaaataattgcccgcatatcgttgtgggtactccaggaagaattttagcattggtcagatcgaaaaaacttaatctcaaacatctaaagcattttattttggatgaatgtgataaaatgttggagttattagacatgagacgtgatgttcaagaaatatatcgtaacactccccacgaaaaacaagtcatgatgttcagtgccaccttaagtaaagaaattagaccagtttgcaagaaatttatgcaagatcccatggaagtatatgttgacgacgaagctaaattaacattgcatggtctacagcaacattatgtaaaactaaaagaaaacgaaaagaataaaaagttatttgagttactagatgttttggagttcaaccaggttgtcattttcgtaaaatccgtacaaaggtgtgtggccctggcacaattactgactgaacagaacttcccagcgataggaattcacagaggaatggaccaaaaagaacgactgtcccggtatgaacaattcaaggatttccaaaagaggattctagtagccacaaacttatttggacgtggaatggatatcgaaagagtgaacatcgtcttcaactatgacatgcccgaagattctgacacttacctgcacagagtagcccgagctggacgtttcggtaccaaaggtctagccattactttcgtatcagaagagggagatgccaaaatattgaacgaagtacaagaaagatttgatgttaatattactgaattacctgacgaaatagatctcagttcatacattgaaggacgataagaatttcaagatctttgaagaattaattttaagatttagaataagatttccactaggtttaacgatttcaatttgtattatgtttcaatgttattgcattagtattaaaataaatgg

SEQ ID NO: 58 - DNA, 4776 bp, Diabrotica virgifera virgifera
gggaatattttttgtgtagattaatttgtacttgtagattaaatgaattttataattcacaaataattctataaacatacgatgaataaaccacctagaacaaaggttaaaaccccacccaaaaacaatttgaaaatttcgcagtttttcttcaaagatagaacaaatttaaaaaggaatgggaccaaggaagacaattctgaacaaagtactaatatggctttaatagatggtgccaaaagtaacaaagcaggaaaaacagtaaatacgaacaatgattctatgcaatcaatggggacacttcataataacaaaaaaagaaagtcgagtgaagatgaagttgataaagagtgtaagaaactctgccatgaagaagaaataagttgttttaaaggccataatgtggatgaatcgttagatgttacagattgttctattttaaatcaagtaccaatagataggcttagttcacctgaaaaattgataaaagttaagagtccaatgaagcaaaagattgaaaaagaaaacaaaaccaaacaaatatcactagttaaaaaagaaattacacagatggacagttttccagacatgtgtgaagtcgatttcgatgattgggaagaaaatactgtaatagagccagaaaacttcaatttagacttaactcagccgtgccattgtaaaataacgcagatagtgacttcaggccatacaatttcactacatttgttatcaactaaagagagtaaagaagccgtttgtgaagtacaaggtatttggacttacagtaacttatctattggtgatacgatatatattacttgcaccaaagttaacaatacttgggtagttaataacgattggggcttaatagttttcgagcctgatatactggtatcttcaacatctgtggtaggttcattatggtgtaaaagaagaaatgtgttagctgaaaggttcagaggtttcgacagcacaaatcaatatatgattcttggaactttgatccacagcaccctacaacacgccttaaaatacaatgttagcgaaacagaaaaacttgaaggattagttagaaaattcatgtcaaaaagtcgtgttgttaaaaatctttatgaatgcgacatatcagcagactggattaatgatgaagtcgtcaaatacataccgaggatacaagaattcatgaacgtctacgtgaataaagggaacaatcaaatacaaataaaagacaactggaaagggagaatagacgatatagaggatgtggaagaaaatatttggtgtccagaactaggtataaaaggaaaaattgatgtaactgttcaagtaaacaataaacctatgcctcttcaagtaaacaataaacctatgcctctagagctgaaaacaggcaaaacgtcgttgtctttggaacaccgaggtcaagtaatgctgtatctcatgatgatgaacaaaattggttataatgcaagttctggcctgcttctttatattaaagaaggtgtagtaaaggagatatcgcacacgaagaaggaagaaagagatttgatatatttaagaaatgaattagtgtactatctaacacaatctgttactgaagctgacaatattctaatccctcctagtctgcctgaacctataaaccacaagagctgcaccaactgcccttatagcgccatctgtaccgtttatgctcatgtcaataatgaaagcctatcttctaagccaacgctgaaaagtatccaagacgagattttacaaaacctgaagcagtcccatatagattacttcatgaagtggactagcttacttttgatcgaagcagagtcgaataagggtgcgaaagatataaaagaaatctatctagtgcctccgagtgatagggaaaagaaaggtagatgtatctcaaatctaaggatatcgaaagttagtgatgtcattgatgaattgtattttgaacattacttcgaaaggatggtcccagatagttcaggaaactttgggactagtggtttacttgttggtggttatgttgttgttagtactgacaagaggcatgctgttgcagcaggttttgtcaatgatatcacggcgacatccatatcagttactttagaaagaaatttaactcttaaatttaaaaatcaaacgttttacatagatagctatgattctggtatgttacaatcatttaatttgagcagtttggctttattattagaaccaactccaagagcagagaatctcagaaaaatcatagttgacaaggaatctcccacatttcgaacgactttgcctaaagtcgttggtaccactggaaaaaccatactaagaagactgaatagagtacaacaaagagccgtattgaaagccattacagctaatgaatactttctaatcaaaggtatgcctggtacaggcaaaactgctaccatcgtagccttgatacagctattatatgaactgggtaaaacagttcttattacgagtcatacaaactcagctgttgataatgtttgccttaagttactggaacatggtgtcaaatttatcagattgggatcagagtcgaagattcacaaagatttgcatgaatattcagagcatagtcttacgaaaaattgttcaacagctagtgattacgaagctgtctataatagtgctcaaattatagctgtgacatgttttgcttctggtcatccagtgttaaccaaacgttgcttggatatatgtatagtggacgaaagtactcaggtactacaaccatctgtgataagaccactgtatgcctgcaaaacttttatactaataggtgatcctgatcagttgccagcagttattaaaagcagtaaagctagagagttaggcatgtccgaaagtttgttcgaaagactctatgcaacagacgctgctacatccttaaacataaattacagaatgaacaagactataacggctttagctaatcatctaacatataatggggaactgcaagttggtaatagttctattgaaaacgctacaataagtttcccaaataaacaagtcttaacagactcgtatagtggtgatagttggatattgaaagcactagacgagtcattagatagtgctgtacagtttcttgatacaggccctgtgtggaatctagaacaagacactagctggaaaattcacaagagctttagcacagaggacactagttctaaagtaaacatccatgaagcagctattattttcaaacttgtcaaagctttactcaaagctggtcttccagccaaagatataggcgttattgcaagttatcgacaccaagtagagcagttgtccaccttacttaagtctgagtgtatagacattaacactgtcgaccagtttcaaggaaaagacaaaagtgtgatcatttattcgtgtggtaattccaaaaacactgataccttcaaggtgtccaaaaacgacgatattttagaagacaaaagaagactgacggtggccataaccagagcgaagcacaaacttatcattgtcggtgatgttaagacccttatggtgtattctacatttaaaaaactgttgtccaattttagcaataatgttattaaactgtgtgagtcgagagacttctcttgggaacagtgtttacttttaaatgaatcataatagcccagttgttagagatttgatctctaaaaccatatggacgagctgaattttgctaagaatgtcaattttgggaattcaaaaagatgaaaaaaatgtttgccactcctaccttccctctaaaatcccccatggtagcggggaaaccggaatacatcgatttaccaagaaactgtatgctgtagaatactttttttactttatttatttatttatttacgggcaagcccaattcagaaaatattattacaaaaaaaaatattacagagacaaaagcaaaaacataaacagtgtcaacacaaagaacaaatattacaataactattggataacaaagctaataagttaaaggaaaaaaaagaacattacgatataagaaacaaacaaagtttaagcttaaaaattgctgatagaaattatatcattaacattgtatgttcaacaaatggtttttgaatctatttaaggaattgcagaatatatttaattcatttagagaattcacaagtctaagtgttcgtggtaacaaattgttgtaagtatagttatatccatggaagcttatgtgaaaagtttttgggtagaatgaattgttctctcagaaacaacgcttgaagcgaccggcgattttgaataacgcaggctagatcaattttttaaaataaaatttgtattttaaaagatattgaatttttaccattgagttgatacaaattttatttaaaaaatttatttcgcggtcgtatcaaaatcggcggttgcttcaaacgttgtttctgagagaacggttaattcttctagacaaaaagtgctaataaacatttttgttgaaaatcatctctgctatatttcttgtttgaaacattttttctatggcgtacagattcttggtaaatcgatttaccctccccccttaggagagaggttttagtagaaagcccgggagtaagagtggcaataaattgacatccctagcaaaattcagcttgctcatgtgatttttataggtccagtggtatttttgtctctagcgactggaacatgttattattttatttaaaaaatacggtttttgtttgtttttatgtaaatttaagataataaagagtatattct

SEQ ID NO: 59 - DNA, 3473 bp, Diabrotica virgifera virgifera
tacaacaaattttaaaaaatatatgtattaaatcaaccaatgtacaatgactactaatgataataattcgtactctcagtatgataacaattttattgataaattgttgggcgaaatgaaaaatacgtttaacagaacagattctgtaaaagcagaattgaaaaatgaagagtcaactgaatcggtagaaatgaatagtgaagaaactgtgacatcaccaaaaaaaatcaaacccgggaactccaggtcgtcgtgcaagcaaaccaaaagtcgatgaaaaacccgaagaaagtacaaaaagatcctccaggagaatgaaaagtgccactaaaaaatcggtcctgcaaaacgccattgccaggaaaaagtcttacaatgaacccacccgacaaagattgacaagacaactgaaaccaacacagaaggtgctggaaaacattgcacaagcaaaagatgtagtaaaaagagttaaaatgaaagacaatgcacaaaacaacaaccaccaaggtgaaggcaattccaaaaaaactagcacaactcccaagaaaaatcaaaaaggtactaaaaccttgaaaatagatgaaagtgatgaggatagtcagtctgatcaaaattgttcagaggatgattttgaagtagataatattagatctataaggaagtctagaagattatctaatagtccaattaagaaagtagttgaagcaactccagatccagcaccaaacattgctgatcaggttgaagacatccctggccatccttccacaatattaatgagggaaaatccagagctagcattaagattatgtctatgcacacaaaagacacatttttatgtagctgaagataattctgaaggtattgtttattgttctgccgttgatagtattgatgacaagttagtaggatgctctagagaagtcactgttggtgtatcatcacttataagaccatcaagaagggtaccatacatgacgctctgtgaattacacaaaaatagaatgattaggcacaactgttgcccaacatgtggcatattttgtacccagggaaaatttgtacaatgtgaatcgaatcatcagtttcatgaaaaatgtcgtttgacagtaggtagtacagaatgttgtccccattgcggcacctcatctccttccagagacctcctacttaaattccaatgcacaaaaaaccccgtgtttcttcctactcaaaaatcaaaaggccagacagctaaaatggctttttctaaagccaaagaccaaatccgtagttctaccccacttctgattcctttagactcttttcaaagtcttgaaacccttgccgacgggacaacttttactgaaaacgacattttggatgctgtcagcgaagaagacaaggaaaaattgatgtcgattatagcttccacttcggtagatcttaactttaaactagacacttttaacaacgggacacttctacactacgccgcgcacaaaggatggctgaaaatgtgccatctgctagtgtcgctaggtcttcacataaacgaaatagacggagaacaaaacacgccgttgatgttggctataacggggcacaagatagatatcgtacagtatctagttagagctggagctgatatagccttcaagggaaccgatggtatgacagctttgcatgtatcgtcaaaatgtggcaacctacaggcctgtaaaattcttctagaagcaggggcgagtattaagaaatatatcgattgtcaggatgatgggggatggacgccactggtgtgggcgtgcgaaaatgggtttgccgaaatcacggactttctcatcggccaaggagcagatcataggttaagagatgtggaatataacgaggctcttcattgggctgcttttagtggctgttctcatatcgtggagctgttacttaataggggatgtgatataaatacagttaacgcacatggagagacacccttacatatagctgctagagaagatagatacaatagcgtgatagtattgttagcgaggggggctaacgtatttttggtcaacaagaacgacgaaacccctctgaactgtgtacctgaggacggcatgtgccacaatccaatagctttaaatatgcaactacaatcgctcgtgaacccttcgtcgaggctatttaccaacatagtcgctgaggacatatcaaaaggcagggaatccaatccggtccagtgtattaacgccgttgacgacgatctcgaaccgaaggattacgtttatataacgaaatccgtcgtagcgtccgagagcatcgctatcaaatcgacgccgtcgtctctgcaaaggtgctcctgcgacgagagatgcaccggcgaggattgcctgtgcggcaaattatccgtcaagtgctggtacgacgaagatgggaaggtttttatggatttcaagttttctgatactccgataatattcgaatgttctgacacatgcacctgcaatgcgatcacctgcaggaaccgcgtggttcaaagaggtacgcagcatcgatttcaactttacaagactgattcaaaaggctggggagtgaaaacccttaggttaatagaaagaggccatttcgtatgcgaatatgtaggagagattttgactgacagtgatgctgaccacagagaagatgacagttttgtcttcgatctcggaactaaggatacagatagtttctgcgtagatgccaaattctatggcaacctaacgaggttcatcaaccacagctgtaaacccaacttgcatccggtcaaagtattcgtcgatcatcaagacgtgcggttcccgagaatagcgttttttgccctgagagacatccgcgcagaagaagaactgagtttcgattacggccaaaaattttggatggctaagtataaagtgttttcgtgccagtgtggatctgatgaatgcaggtattctaatgaagctattaaacgtctgattgacgacattaacttaaaggacgacgacagtttgtctagttaataaatcattccagtatactaggtggttcatatgtttttacaaattggaaacagggccttacaaattttaaacaaccaagcttaagttgggtgccgtatttccatcattctcttaactaaactgatgctcagctgtaaagttaattggtttggtacctctgaatacgtcaaagtgccagagctaactgttctgaggtaaaaaccactactgttgacatttaattttatcttgtcatctgtatcaatgttatttttacttcacttaattttgtgtacatggtacatgtgtttttatgttagtatattgtctatattttctctgagaatgcctagtagatatgccaagtggtaaaatatattcacagtacataaacttacgtgcatagaaatcccccctcaaacattggtcatttttgatgtatcacatttctacaacctgttggccgatttaagtgatttc

SEQ ID NO: 60 - DNA, 1624 bp, Diabrotica virgifera virgifera
  misc_feature (14)..(22): n is a, c, g, or t
ggccgtcacccatnnnnnnnnngcagggcgcgatcagtattatatatctatggttttacaggattataattttgcttccgaaatgtctacaaattctctagaaaatgagatcgacaaaaacgaacagaaaaacgacaacgatttagaaatacccatggacttttctataaaacatcccttacaaaatgcttggactctatggtattatgaaaatgatagaacccaggcatgggagaaaaaccaaaaagaaattgccactttccaaactgtggaggacttctggagcctttacaaccacatcaaaccttcaagtgaattaaggcaaggaactgattattccttattcaagaaaggaattagacccatgtgggaagatgatgccaataaacgaggaggcagatggctgctcagcttagaaaagaaacaaagaaacaatgatctagatagatactggttagatattatattatgccttattggtgaagcttttgaaaattctgaagaaatatgtggagcagttgttaatataaggcaaaagggagacaaaatagctgtttggaccgctgatgcccagaacagtcacgcagttctagagattggaagtaaattaaaggaaaggcttcatataccttctagagttacattgggttaccagttacataaagatacgattcagaagactggatccgtctcaaaatattcatatactgtataatactgcagggaattttagatatcacggataagcaatagaaaattcagatgcaaccaatctaatggcacatacttttattgttatacatctaacgtttttaaacttaacttatatatcatacaacatttcacattcttgattcaaaggtggtataaatgttaagtttatcattgcatgcttaacttttacttaaaaatagtaacacattgattgttgttacaaagctacaaaagtagttccagtatttatttttttctgccataacagacaacataatataaacatttatatcactttttgttttctcttttgctggttgatccatgggaatttgcttattactaacgttgcatctggacgattttttggaaatctgtgttgtcaacttaattaatcagttaatgttaacattcatagttaatttgaaattgtatcttctagtactcaataataatttttagtttgaatgacttttttattgttacagaaatttagattttttttttggtatgaatgaaattctacgtatttgtttaggttattttttttgtttattttttttttcatcattcctatgtttacaagacacacagtttaaaccctaagatcaaaatatcgtgtaagatcacagtatatagttgcacagactttgttttatacatatctctctatacttttactactggttaagaggaacctcttcctttggctttatcgtcgtcctgcttcgactgaacactttcctgttccacatcttgtaaaacacgcagatgaatatgagcactggaagacagatgaagaagattccaattgacgtgcagatcactttaaagttgataagaattttgatcaagaataccatgttttcaggtagcagaaccgattgttcgaagtatagtactgggaaaa

SEQ ID NO: 61 - DNA, 1304 bp, Diabrotica virgifera virgifera
  misc_feature (280)..(482): n is a, c, g, or t
tgttggcacatccattcatgatttgatttgatactgcgttaaaagaggataaatgaaagataaacttgatccttataattaattaaaaattataatacctggtggggaattgtacaattgaaaatgcccttaacacatgggatattttcatttttctaactaacaacttatttgataaaagtcctccagctccattttctattttggggttataaaagtgacatcttgcagtgacattagagtcgtaatttcaaatagtttactatttataaattaaaannnnnnnnnnnnnnnnnnnnnnnnnnnnnnnnnnnnnnnnnnnnnnnnnnnnnnnnnnnnnnnnnnnnnnnnnnnnnnnnnnnnnnnnnnnnnnnnnnnnnnnnnnnnnnnnnnnnnnnnnnnnnnnnnnnnnnnnnnnnnnnnnnnnnnnnnnnnnnnnnnnnnnnnnnnnnnnnnnnnnnnnnnnnnnnnnnnnnnnnnnngaatacagctgtgataaaaagtttcatggtatttaacattaataaatctgcttcaaacatgtcaaacaaattcgaaacattgaaacaccatgtggacgacgacagtggaagtggagacgaagattcaggcccaaatatcacagatttgggccccattgactatcctccaggagaacacaggctgcaacatccctattgtttatggttttcaaagagaccccaacaaatacaagggttgcagggatatagtcaagcactgaggttggtagggcaggtgggcacagttgaacaatggtgggcgttgtattcgcatatggttagactacaagacatacctgcccacagagacatacatctttttaaaaaaggaataaaacctatgtgggaagatgcagccaataaaaaaggaggcaaatgggttataagacttaggaaagaacaagcaggaagggcttgggagaacttatgtatggctatgttaggagaacagtttatggctggtaatgaaatatgtggagtagttgtatcaacgcgatatcaggaatacctcctaagtatttggaatcggacggcttcagatcaagcaaccacagctagaataagagatgccttaaaacgactgttaaatataccttctggtgccactatggagtacaaaacacacaatgattgtctcaaatatggggctacaaaaacaataccaaacaatttgttaaaaagctgaccccgtaaaaagttttagaaaattatgattttactgtttactgaaatctgtattgaaaaaataataattaagataaacttcattaatgttaaaaaaaa

SEQ ID NO: 62 - DNA, 885 bp, Diabrotica virgifera virgifera
gatatgcaattattatataaagtgtggctgacatcctttgaatttaaacatacaatcaaccaagagaggccccctattaaaaaattgaaacaccatgtggacgacgacagtggaagtggagacgaagattcaggcccaaatatcacagatttgggccccattgactatcctccaggagaacacaggctgcaacatccctattgtttatggttttcaaagagaccccaacaaatacaagggttgcagggatatagtcaagcactgaggttggtagggcaggtgggcacagttgaacaatggtgggcgttgtattcgcatatggttagactacaagacatacctgcccacagagacatacatctttttaaaaaaggaataaaacctatgtgggaagatgcagccaataaaaaaggaggcaaatgggttataagacttaggaaagaacaagcaggaagggcttgggagaacttatgtatggctatgttaggagaacagtttatggctggtaatgaaatatgtggagtagttgtatcaacgcgatatcaggaatacctcctaagtatttggaatcggacggcttcagatcaagcaaccacagctagaataagagatgccttaaaacgactgttaaatataccttctggtgccactatggagtacaaaacacacaatgattgtctcaaatatggggctacaaaaacaataccaaacaatttgttaaaaagctgaccccgtaaaaagttttagaaaattatgattttactgtttactgaaatctgtattgaaaaaataactgttgaaattgttctaacatatttcaaaacgtgtaaaaaaatgtaatacattttagttttcagcctaaacttaggccacacacagtgcaat

SEQ ID NO: 63 - DNA, 1760 bp, Diabrotica virgifera virgifera
attttataaaacgaccacagacagactcactttcaggtaaaaaaatcctaacttatttgttaccacaagttagaagtggttaaaagcatcctagaagccactaagtgaattgcaatacctgggcggagcgacagtattcctatcacttcaaacttcaattcagcagccttttccgtttagctatacgcgaagtagacatgtctatgccagatttcagcagccttttccgtttagctatacgcggagtagacatgtctatgccagatcgtcgtgaagagtgggacaagaatggcccagctaatgaagacagccagccccaaggctatgacggcccaccaggtatggagcctgatggcattattgaatccaactgggaagaggtggtcgataatttcgacgacatgaacctaaaagaggaacttttaagaggaatttatgcctatggttttgaaaaaccttctgctatccaacagagagccatcattccttgtgtaaagggacacgatgttattgctcaggctcagtcaggtactggtaagactgcaacattctccatctctattttacaacaaattgacacgtcagtgagggagtgccaagctcttatattggcaccaactcgtgaattggctcaacagatccaaaaagtagtaattgccctaggagatttcatgtcagcgcagtgtcatgcatgtattggtggtaccaatgtacgagaagacataagaaaacttgaaactggcgtacatgttgttgttggtacacctggtagagtttacgatatgataacgaggagagccctaaggccgactcatattaaaatgtttgttttggatgaggctgatgaaatgttgtcaaggggttttaaagatcaaattcatgacgtgtttaaaatgttgaacactgacgtacaggtaattttactttcggctaccatgccaaacgatgtgctagacgtgacaaaatcctttatgaggagtcctgttcggatacttgtcaaaaaagaggaacttaccttagaaggtattaaacaattttatgtatatgtagaaaaagaagattggaaattagagacattatgtgatctctatgatactctttcgattacgcaggctgtaatcttttgcaatacccgtcgcaaggtcgattggttaacagaaaacatgcacaagagagacttcactgtttccgctatgcatggtgatatggaacaaagagagcgtgacgttattatgcgtcagttcagaacaggatcatctagggttttaataaccactgatctgttagcgagaggtatagatgtacagcaagtttccctagttattaattatgatttgccttctaatagagaaaattacattcacaggattggtcgaggtggtcgatttggtcgtaagggtgtagcaataaatttcgtaacggacgatgataaacgcacgcttaaggatatcgaacagttctataatacaaagatagatgaaatgcctatgaacgttgcggatctcatataaaagcgagctaataaagagtgttggtgtgttctacgacgtctcctgaagtatctttggtgcgtcgtcaatcctgtggacaccaaaatttggaaataaagaactaatttccattttaaaattacaattcagtggttttgcttcttatttaaaacccgttttccatactccattttcctatttttacacattttttaatttatttcgtaatttttaactcttaaaataaatttatttttatttaaaaaaaaa

SEQ ID NO: 64 - DNA, 854 bp, Diabrotica virgifera virgifera
agcgtatgaagatttcccgaagatagtagaatcctgtaaatacgatcagtgttgtgtgttttgtttgtgtacctacttagtgaaaaagaaaaatatataccagagcagaaactagagattcaatgtgaaattggtccaatgtcaaaatgttcccgctaccccaactggacccatgttcctgcattgaccattacaacgagtgcgtgacacagaatccattcttggcccaaagactctttaacccttattttccccagttttggctgccgtttcccattaagataacccaaccccgtccagaaaagccgccgtattcctacattgcccttattgcgatggccatatcgtcgtcaccaaagcaaagactcacccttagcggaatttatagattcatcatggagaatttcccatactacagagaaaacaagcaaggctggcagaattctataagacataacctgagtttaaatgactgttttgtgaaagtgcccagagataaggtgtcacctgggggttgtgagcaggccggagctgctggagcaggggggaagggtagtgctggagcaggggggaagggtagttattggatgttggatccgaaagcggcgaatatgttcgaaaaaggaaattatcggcgtaggaaaacgagacgacaaaggattgccgaatgtacaagtttatatcaggaacaagcgctacctttagtttccaaatcccaccaccttcaaaccaacgtcgaactcgaggaaagcaatgcggaatcaactcgaagtaaaaattccagcctatttactatagaaaatctaatcaaaactaatgattccagaaacagaactacttaaataaatacccag

SEQ ID NO: 65 - DNA, 2004 bp, Diabrotica virgifera virgifera
cgatccaaactggttgcattatccgagttagtttttaactgcaatcgttggcgagaggttgtgtagtagtcgagtgattagaattgtgattaaatttaaaatatggtgaaaagagaagacacagtgttgatagtacctacaatggctcgtacacctttaaaatcatctttttcaattagttcgatacttcctgaaacagctttagaggccccaaagagtccacagcagacgccaagtccaactccgatatcagaaactgatttgagcgattctgattgtgatctggacgttactggtgatgacgacgattctcctgtggtagactgctcaaaatcagaagaaaaatcttccgaggataagaaatctaaagaaaagccaccgtacagttacaacgctttgattatgatggccattagaaatagtcctgaaaagagattgactctgaatggtatttacgaatacataatgtgcaactttccatactacagagaaaataaacaaggctggcaaaattccataaggcacaatttgagtttgaataagtgttttgttaaggttccaaggcattatgatgaccccggaaaaggaaactactggatgttggacccttcagctgaagacgtttttattggaggaaccactggaaagcttcgtcgcaggtcaaccgcagcttccaggtcccgtctagcagcttacaagcgaacattatccatgtactcacccttacaaccgatgtatccaggattctatcctccatctccggcacttctagcagcagcttaccaaaggtaccacccgtatatagcaactatgggtagtacggccataccaaccgtcctgaggccatctccagtacaaccacagcccggtccacaaccttttagtatggaaaggttactcggggcaacacctactgttgacttcttcagacaacctttggatctgtacagtagctttaggctgccgcctccgcctagtatgttagcgcatcaccaaatggcgttatcacctacgagcagttccagctcaccagaacctagaaccagtccggacacattgtttaaaccagtggctgtgatgtctaggcatagttgagaatattttgaatcacttagaaaatgaacattacacaatttagaaaaggctggttcttttttgacttggacatttgtctgtctttctcatagacgtttttatgtacaaaactttatgtgagtatcacattttagctttaataggtacgtaggatacacaattcatgcattcaaaaagttaggtatgtagcctataaatttattaatatttcctatgttgtttcaccaaaataactgtcaacagtacaactacagtacctatatttatattttcagctatattgatgtttataaatcaaatatttaatattcgactaattagttaagaacgtaagcgcaacatttcgttccaatgctttttaaatgcattcattttttttcaaatcctgagaaaactaataagtatttttgaaaaatttaaacgcagaatgaaagatcacattattaccgagggcggaaactccctgaaaacttctataatgtttgttttaataagctacacgagtgaaaaaaaaagagaaaatgtatgatttttaatttcaaatatcttattcagaagaaactttttgtttattctaagagacttgctgcctcggtaataatgtaatgattctttctgcgtttaaatttttcaaaaatatttattagttttttcaggattcgaaaaaaattaatgaagttaaaaagcattggcccgaaattttgcgtctacgctcttaaacgtagtcatcttactttttacatattttgatctctatgacacgtccaattaaattgaagatttttgtagtatctgtaaatagttgtaatatagtacatttctcttgtgatgttagttgtaagtaaattgtacagtattaaattatctattacttattgaaaagaataaactatatcaaataacaaaaaa

SEQ ID NO: 66 - DNA, 2624 bp, Diabrotica virgifera virgifera
ctctataccacaaaatacaaaatattccgtctaaaattactagatgtgtctgtggtagagactgttttttatgccaatctcacgtgtttaccaacatttctatcgactaggacgttatgaaatcaacatacgaaccaaagtgcaacacaggtgactcccacgtttgtagcaattcttaggtaaacagtgaagtgagacagtttaaagagtgtggttaaaaaagtggtgtgaagtagtgaatcaccatgtccacatcatattcaatgactccggaaagcgatgcatgggcccttctcgctctaaaatcggctcccgcgagtccttcgaaggtacagtggagccccgacgtaaaaggggaaccgattgctcgaatagaaggccgtgaattcgagtacctcgttcggcaggatcggattattataggtaggaacagttcacgtggtgatgtagatgtaaatatgggacattctagttttatttcgcgaaggcatttagaagttttcttcgaacacccttatttttacatgctgtgtaatggaaaaaatggtgtatttatcgatggagtatttcagaggaaaggagccccttcaatcaagttacccaagacgtgcacctttaggtttcccagtacaaatatccgattatcgtttcaatcgttggtcgacgacaattcggagccacctcctaaagtcagggaggtttcgccgagcaggataagggatcgttcagggggtggaagcgggtctacgctccaccctctgagaatcaatatccccgatggtgtagactatggtagtccattcccttcgcctactggtaccatcagtgctgccaatagttgtccagctagcccacgtggtggtcacggatctcacagcagtaaccatggtaaaagaaacgttcaagcagatctgcaaatggtagcccaatatgctgctcaagtcgcccatcgagatgacactcatcatgttcctcaaagccatagtcctgactacagacaacctacttcaaatggaaactcgatgccttccgtcgtggtaagcgaagtaccatacggagcaagcagtagcagtaaagatgattcgaagccgccatactcgtatgcgcagcttatagtacaagcaatagcaagtgcacccgataagcagcttaccttatccggaatatatagttatataacaaagcactatccttactatcgtacggccgacaagggttggcaaaactcaattagacataaccttagtcttaacagatattttattaaggtaccgagaagtcaagaagaaccaggtaaaggttcgttttggagaattgatcctcagtctgaatcgaaattaattgaacaggcatttagaagaaggagacagcgaggcgtctcgtgtttccgagcaccatttggtttaagttccagaagtgcccctgcttctccttcacacgttagcatgtcggacataatgacgccagagtgtttatcgagagaaggttcccctacgatggagcacctcgtcgacatcagtcagtctgcaccaggaagtcccggtaatccggtgaccgcatacgctggctctggaggtatgataggtcatcaacaaatgtcggcattggtaggtgccactaaggctagattattgttgcctcatcctgttgacaatattacagaagttactacttccaatgggcaagaatatagagaagaaaaattcaatattgaagaaaggtcaatgtctccaggaggattttcatcacaacctgttatagttcaagctgcaaactatgcttacagcaccggacattactctaacatcggtatggatttgaagaggcatatggacgaacaaagcgtgggaagtccttctagttctggagaaaatttagatggagaaattgaaattaaaagacccagattcggtcaagtgaagttcgagacggaataaaattcccgatagtgaaaatcgtcagcgatcttattgtgctttaaaaaaattacttggaatccatagacatatggaacaaaactcacaatttatcgaaagtagattcgtcatcatttatgtcagacatgtttaataatagtattttctctatttagaaagtatttctttattaattatcccaaagtaattcacgtacagtgtctgccaaaacttcagaatttgatcaaaatcaaagctaagtacatataccctttttactacaaaaacatgttcattcaagattcattgcgtcattcaggatgtgagacaggtgtaccaacagctagccaattacaaaatggtcgagaatgctaggtttgaagttaaggaacagcagattagggaaatttctattatagatagcgctgtttgaaattttggaaagtgtatttagtagggtttttaactgtcaaaatgcgcttacagcattcaagatttctgacatcagggcggtgccaaaacaccggaatacgacgaatacgacttttcatcatggtcttgttcctagtacagtgagaagttaggcatattacttgtgtatgttcttgtttactgaacaactaatatcaagtaaatcgctcttcatcacttgccgaaatatattaattagtatatgtatattaatgattgaccgcaaccagcaacact

SEQ ID NO: 67 - DNA, 3884 bp, Diabrotica virgifera virgifera
  misc_feature (3807)..(3843): n is a, c, g, or t
  misc_feature (3863)..(3865): n is a, c, g, or t
tcaatctttttttaaattgtgtaagaagttttataaattgttatctttttataaaatattttcctaaatttaagtaacatgagaataatctaaattaaaattgagattggtgtcattttagggttaacgaaagaatgcagtgattcagaggtatcaacaacaaatatttaatatcatggcttcctccctggtaggccccaaaccgggtacagttcagaatattaaatactccggttctgatgctgagttttgtacagatgttacgggtgaaacagtaatcatttccagtaatgatggcagtcacactcatggaagttccaaactgaaattaatagatagaatagactataactgggaattccgttactatcatgggcaccttgttgcagctcatattaatggaaaagttattgcatatgcaatgaaaggaaaggaaggtggtatggtgagagttaccaaccaagaaactggtataagagctctaataaagaattttaaagatgatattaaggacattgcttttgcctatataagagaagaaattattttaggttgtgtagatagtgaaggaaatatattagtctacaaaataactgatgaaacaaattcaatatcatctacattacttttacatgtatatcatcatcatcgttcgagtatatcgaaaagtaattatagacttatatggtgtccttatgtgccccctattgacgacgacgaagacgttgatacagtagttgatccagataaaatgtttgtagtactgaatggaaccagagcctcaatatacaatttaagtatgttaagtgaaaaatgtcttgtaagcaatataatcgatcctgatgaaagctttgaagggtacatagaaattaatcacaacgctgaagtactagatgcttcatttgcttcggatggtactcacatagccatagcaactggagatggatatgttaaatttattcaattatatttttataactcggagaagcaaaaatcgctttttgagtttagacctcatgatggtactcctctttcgtccctgatgtttatagataaaatcttggagcccagttcagagtgctggaaatttttaataacaggagcaaacgacaattccgtaataaaattgcattcttgtgaaacttggtcctgcttacaaacaatccactttaaaccccatcccaattcaatatctggcctgtatctcaacgtgtcaactgattataccggtcaatatctattagtatcagatattaactacagagttctgtatgtgttagaattaaacagaaatgacaaagaacaaagggtgcaagtcacaaggatggcggggtttttacttccagcccctttcctaagttttcacatattagaagctactagtcgtattatgccattttcatacaataatagtacggaagacgaattttacgaagacagagatgaatttgatgaagattcagaaagaacagcaatttgcttgaaaatgttagttatacaacctaagaagttccaagaatgtaatatagttttcgaacctgaaactatgtcttataattcgttaaataattctgcagaagtgatggagaaaaccgaaaaattccccaaattggacgatctacaagaatcagtatctttgctcatacaacaaaaaagcagttcaaatttgactttaatgacaccagatgactttacaccttcagggcgcaatacacggccgaacagtgttagaaatgataccagcaattctttagaagcatctatagctgaaataaatgacgtcgtcgttgataatcttatagatttccaaagacctcagaaagacaattttgccagtggtggttctagtccgagcagagaggtgcaagaaatattatctttgaataattctacgtacagcactcaagacttctttgacaatcttcccaagcttcaagacaatcaagaggagccccaaaaagactactcaaatcacactagccttaactatccggacaaaataactaatgaatcagttgtaaaatgttggcaaaatgtgcctgtggttcaagaaaatgaaattataaaagacgaagctctaagaaaagaattaagattaagtgctggcgatgaaaaatcacagttccaactactagggtatcgtattaatgccttagaaaacatagtgcgagaacaaaacgttcttatcgaaaaaatccatggcgataaaaaagaagtggatttggccttatcaaatcaacaattacaaatcatgaagatgttagaaacgctcgttaccatgcagaaaactactgaacgagatttacaagaaaacattttgactggggtcagtcaaattttcacgaaatccttagcggacaaggtacagcagatccttgcgagtgaagttaaaatggttattttaccagctattcaaagtcaagtggagtcatacagacatcagcttgaaagtcagtacgctcaaaaaataagtcataccgatatgatgttaagggataatatcgcaaaagcttttaataataaggcactggcagatacccttagcttgtccgttgtaaacatcgtagcacctagtcttgaaaaatgttatcgggatataatttcttcatctttaataccgtcctgggaacgagtatgtggacaaatgttccaacaaattaacgaaacatttactcgaggtaccaaagaatatactgcatcagtagaaagctacatggacaaacaaagaagagtgcaagagaagggaaaagatttgatagtacaaatgcaaaatgtctcagaaaccatgaaaaccaatgctgacaaattaactagcaatttgacgactgagatacataaacagtttcaaacggtttttaaaagtatgaacgataagcttacgagtaatatacgagagattgtgatggaacaggtaaaacaaggattcaaaagtcacgctactgtcatagaagacagtgttatgaatgcagtccgatcaagggcagttactccatcaccacttctggattctcatgtgactaccatgaaccagattcaactttttatatcaagacacaattataacgacgcctttcaaatagcactaagcgctgaaaatttggcttacgttattcacgtgtgcgaacgtgttgacatacaaactttgttcggcgaagaatgtcttttacaacaaagttgtctgctagcccttatccaacaactgagcttggagttaaataagaatacagatctgaaattaagttacattcgtgctgcgttcctgtctttatcgccagattgtacagcaacaaaacatttcattccaaaggttttgaaagatttgttaaagcagctgaacctctttattcagtcgaatccaccaatgaaacaattaaaagaagcaaaacttattaaaatggctgtggaaagcatgttagttaagtgatatatgttatttttatactattattgtaaaaaagtcttgtttattttcttgtgtattggtatttgcgtattattttttgatacgtttggcatatggctttacatttcaatagtctctcactaggaatatcctatccctgaataataaattttgttttaaaaaacaatacaaatataacaagtgtaaaaagtcccacgactaactagagtctgaataatgtgttcaccgtgtcttgtttgagtgagaaacgcatgtgggttcatctccatgtgtgaattcttgaaatgaagcggcacatttggtcgtccaaacatgttgtaaaattcctgtatattctttgtttcttgaactattcaccaaatattatatacagagtgggccannnnnnnnnnnnnnnnnnnnnnnnnnnnnnnnnnnnngattttagggaaatacaaannnaggtcaattttttatcagg

SEQ ID NO: 68 - DNA, 2512 bp, Diabrotica virgifera virgifera
  misc_feature (247)..(307): n is a, c, g, or t
tttattttcggccagaatttttttggtgatcaaaaacacaaacttgttgatgagttgaaatcgtttttatggatatagagatggaacctcaagtaatgacaaataataaattaaatttactgtcagacactatgttttatgatattctctctaaaaaatcttacccattgagtaactacagaaagcactcagagaaggataagtctgaagtgttaaataataataaagaacttattaaattagaatnnnnnnnnnnnnnnnnnnnnnnnnnnnnnnnnnnnnnnnnnnnnnnnnnnnnnnnnnnnnncaataacaataaggtaaagcagtaccaccctagagactcacctaggcaacgagataattatagacctatatccccaaaaggatatgacagtgatgaaagctgtacatcatattcttcaagagaaacccctccggaaagcagggtaaaacataccaatttaagaagtactgttagtagagctgatgaacaaactatagtagtaggaaaatattgtcacaattctccgaatgtttaccattcatctaatattcactatcacgtacaacataatcatagtacacacaacagtaatgggcattacagtaaaaacagatactataccaacagtaacaataataaccataaccacaaccatcacaattccaactccaacggccgtcagaaatacaacggccattcgaaaaataatatggatacgatgataaagagggcgcacgggttagtggaacgattcaaatctcgcgcggaaatgttgaaaatagagcccaatccgctcggattatccagcggcggaccgtgggaccaactcaatcaagaaatttgggatctttttattaatagggcgcaaaaggagaaaacatatgacatgaaaattaacttgtggaaaaatctatttttatatataaggaagtgtttaagcagctatggtttgtttatggtcggatccaccatgtcgggattcggtttggagagtagtgacatcgatatgtgcttgttaacgaaaccttgtactaacgatcctcgattagattctctacaccaccttgatgcgattcgagaacttctagtcaaaaacgaggtgacggcagatccggagttaatattggccaaagttcctattttgaagttcaaagataaagaaacaggatttgaaatcgacttaaactgtaataatgccgtgggaattcggaatactcatctcttatatagttatgcccgtcttgattggagagtccgtcctctggtgattattgtgaaaatatgggcccaagcaaataacatcaacgatgctaagaatatgacggtgtcgagttactcgtgggctttgatggttatacactacctgcagcgtggagtagttcctccagttctgccctgtctgcacggattgatccccgacaagttcaactctttcacggaaaaccactcgatggacgtccaagaagaactccccaccatcaaagatttccaatcggacaacagcctaaacctagcggaacttctcatcggcttcttcagatactacaccaactacgacttcaaccactacgccatatcggtaagaacgggctccagcctgcccatagatgagtgtagattcacgaaagcccccaaaaacgatccacaccagtggaaatttctatgcatcgaagaaccgttcgatcacacgaacactgctcgttcggtgttcgatctggaatcgttcaagctcattaaaaacagcattacggcctcgtacgaaatactcgtcaatacgaaaaatctttgtagcattctccctgtgaacggaaaatccgaagtaagatgatacagcgacagttttgatcaaattattttttactaaagtaaaatcccgcagatccttaatttactattggagtaaatctttctgtcttttatatacagtagtacttatttcaataccgatatgtgataatagtattttgattctggtttctccccttcgggttgtgaattaaaactgttaaagtgtcactcgggatacaaatcgataattttggagctctcgtgcaattactattgataatttttgaggaactttgactccgctgaaagtcgcaataattgtagtagtaataaaagacaatcttccttttaaataattttaataaaaaaagccactttactttatcatatattacatatcaacttaaaatataatacttaatccattccgtcaaagcttatttcgcaaaattaccccgcgacaagacattttcaaaacgcctttgaaaatgccctgcaagtcccaagcaatttgatctttataggttctacaaccgatttcggaatcattgtcggtatgtcttcaaatgaatcaaaagattgcctctcgtccgttggacggacagccgggtgggcggcaatctataaatcgcgcttaagtgtcaatgtaatttttcattaatcgttttaaagcatatttaccctatacaccctacacaataggtaaagccgcctctg

SEQ ID NO: 69 - DNA, 2239 bp, Diabrotica virgifera virgifera
gttacgaatatttgaccaacttaggttatattgaccatacagtaaatcctatccttttcaatatgcagaaaatccaaaaagcattgtcaaacgctatcgaaaattttataccagaaataagtaacagtaaaccatttgcttgtatggtatgtaaaataacttttcattcaagagcagctcttcaacagcatttgcttagcgtcgaacatacccaattgttgaagttgaaaaagatgaaaccactcatcattggacaaattagcggggtttttgtaacaggtttggaactatagtttggatttgccgtaagaattttttgatggtggaatatgctgaacaaaaatctgtagagaaaatattaaggttaactcagcattttgttaatggcgaaaaattgtttgttaaggaaagagaatcgtcaccccaagatagagcaaatgtacagccaactttggagtcccaaccgtttatggagcgtttaaaaacgacagacggtatatcggagcaagttgcagcgctaattgctcacgtacaaggtgatcaatcgtataactttacacctccacacggagtcatatgtagagatctttacgaagtaataagatatagttatccacgttgccaacttcacccttttggatcttcgattacagggctccatttttggaccagtgatgtagatgtgtacatatctggaatacgacgtggtaacacagatgaaaagaagttgttgtatattttaaagggcattttaagtcgttctgatagatttacgaatctatttgtgataggacaggccaaaatccctatattaaaatgtgtacatgtaccgacgaatacttcttgtgacattaatgtaaggaatatgctaggggtgtgtaatagtcgcttgataagatactatcaagatgtggactataaaatcaaagagatgatgataatcattaagtattgggctaaaatccataaacttacaggagcaaacacgttgtttacaaattattcattgtgcatgatgataatttttttgtttcaagggaaaccgtatgaacttccgtccgtggagtatttacagcaggaacgtgaggatgctaatatacaagatggttggaatggtggttttaggaaggtaccagttatttcatcacatctgcataattcatcattacttgatttgcttgccaattttttctcattttacgccgattttgactacggaacatacgttatttgcccgtaccttgggcagcctttaaagaaaacagattttagagaaccagatagtctgccagatgtatttacagtatataaaagggtcgtaaaaagtaaagaaattacgccattaaaagtagaatccgtgatttgtatccaggatccttttgaacaaataagaaacgtaacttcagctatatctctaaaggtcttacagaattttgtcaatttgtgtacatacggaaagcaaatggttgagcaggagaaacaattcttgtttaaactgttttattcagacccacctaacttggaaagggaagcagtggtacaaaatgacgttattaaatttagtattcaaatgtccccacattttaattacttgagtaagcaagttgacgaagatgtcgccgataaaactgctgttataaaggaggcttggtttaattctgttaaagaattcatgataacagtacttaaatgttttttacgaatctctgtagaagaaatcaatcattcaggtggtaaagtacgaaaacttaatcataccagcgacgtctctaacgacgcacaaatagctcattttagatgttccgcgaagttagcttattggccaaatagaaaacgttctctcggtaacaaagacgttaaatcactcatcgaacgagaaaaagcgattactacagaaatggactcgctttttaaggacattacacctctagtgaacatattggagtttgatcttttcctcgagaagcggatagatccggcacaagtattaattaacttgatcaaaataaattcatacaaaaaaacttttaagggttttgggcattttatcagtaatcatttcggcaattggtttgaagaatatgaaagggaattgaatagtgccagctaataggttacaaaaatatatgggtatattaaaactaaaactattgttgtatgttcacatattcaacatcacaaattaatgcccccaatgatattttaaagcgatattttttgctgatcatcttttctgccc

SEQ ID NO: 70 - DNA, 929 bp, Diabrotica virgifera virgifera
ttcctatccaacctgcaacagctaaaaaattgacattttgtttggtgcttgtgattggtagtgtttgcttctgtataaatcttcttcattgtcaatccaaaatacaaaaaatagtggcgtctattaggaaaaacattttattatattatagagtgtttgttttaaggctcagtatctctaaatagaaataataaggtaatcatgagtaaaagaaacagtcctgttccggaagaagaaccaccagccccagaagagtatgttgtagaaaaaattcttgatagtcgtattaatgatcatggtattaaagagtacttcttaaaatggataggctatgaagaaaaagacaacacctgggaaccagaaggtaacttagattgtcctggactaattgaagcttttgaaaaggaaaaggctaggaaagacaaagaaaatgagagaaaacgcagaccaagcactttaacagaacaaagatcagtgaagaaaaaaactgacgacaaaaaatcattaggcttcgatagggggttagagccagagaagataattggtgctactgatagtccgggacaattaatgttcctaatcaaatggaatggaaccgatgaagcagatctcgtacccgctaaacaggctaatataaggtgtccacaggttgtcataaaattctatgaagaaaggcttaaatggcatgcgccctcgctagaagattcaaaagctcgctagaagattcaaaaggcgagtagatgtaatgtttagattatattttaggtttttaatcatgaaattgtgagaagttttaaccagtggcggtttaacctaacttcgggccctgggcactagagatttagggggccccttcattgctattcgttgtcaatttttttaacaaaaaaaacacatgaattaacctgctttattgtaactataaacgt

SEQ ID NO: 71 - DNA, 5879 bp, Diabrotica virgifera virgifera
tcttacaacatccaagactactttgttgattttcgttaattttaagtaataccatttaattatttaagactctaacatgtcgacaacgggtaaaactcctcccattaccatgagcaagctttatgttggtaatttaccgaatgataccagtgaaaattctctccggcaactcttcactgaacagaatttgtcttgtacgactattttgataaaacgtggaggatatgcttttgttgattgtcctgatcaatcatcggcagataaagccatcgacaatctaaatggttttacttttaatggtgcagctttggttgtggagccttcagtggcgtctggcaaaaagaaatctctttctggaaattcagatactgcaatgcaggtcggcaacggttggatccaaacgtcaaaaatcataatatcaaatttgggtctacatgtaaggttcgaggacatcgaacacctcctcaacgaacatggacgtgttgtatcgtgtgacaagttgacatcgaaagatcagaatacacagaccgtcgccgtcacgtacgacacccctgagcaggctcagatagctgtaaatcagttaaatggtgttgaagtagaaggtaaagcattcaaagtagaattggctgtggaaaaacgggggaaacgtaatcctagaggaccaggtgctgcttttggaggtctacccggacaaaacagacaaactgacttccccttaaggatattggtacaaagtgatatggtaggagctattattggtagacaaggttcaacaataagacagataacacaacagactagggcaagagttgatgttcatagaaaagacaatgtaggttccttagaaaaagctattactatttacggtaatccagagaattgtacgaatgcatgtaaaagaatcctagaagttatgcaacaggaggctaacaacacgaataaaggggaaatttctttaaagatcttagctcataataatctgatcggaaggataataggaaaaggaggtaataccatcaagaggataatgcaggagaccgataccaagattaccgtatctagtataaatgatatcaattctttcaacctagaacgtataattactgtcaaaggatccatcgaaaatatgagtcgcgctgaatcccagattagttctaaattaagacaaagctacgaaaacgatctgcaggccatggcaccccagaccatgatgttcccggggttgcatccgatggcgatgatggccacagcaggaattggttatggttcaagaggactttattcaggtcaagctccttaccccggtatgtaccccgcagggtcccaatctggtggcgatacccaagaaacaacctacttgtatatccctaacaacgctgtaggcgctatcattggtactaagggatcacacattagaaatatcattcggttttccggagcgtccgtcaaaatagcacctattgatgaaaccaaaccacaagaaacacagaacgagaggagggtgaccattgtcggatcaccagaagcacagtggaaagctcaatatttgatttttgaaaagatgagggaagaaggtttcgtcgctggatccgacgatgtacgattaacggttgaaattatggtaccaagttctcaagttgggcgaattattggtaaaggtggtcagaatgtaagggaactgcaacgtgttaccggcagcgttatcaagctacccgaacaaggggcgtcgccacaagaagacgaaacaacagttcatatcataggtccattcttcagtgtccagtctgcacaaagacgtatccgagcgatggtcctccaatcagtagctcctccacagggcagacagcgccaatcaaagcagaaagataccagtcaatcggaagctacctcatccgagccacaacagtagtactaactagagcaacattcatacacactgcctgtgcgcatgggtttgtttctgcataccctattttttataagaaacctctctcgatgccttccacttgtaccatgttgaagattatttaaaagcagcgttcgagcgtcgacctggctgctccacttggttacgacaaagaaaccgaggcgtcggtgaagccccctagttgcgcaaagcgttgagtttttcgcgataacttctttttcatgtcaattattttttgttttctcaagtttttatttttcttgaatagttagtttgaatagtttataattcagttgaccatattatatatatctataggtattgatagtggaaagttttgagaactctccaggaataaggtatgcgtcgaactacgtgcctattgaactttaatctacctcaaataatcaaaatatattagattttatagccactgaaatttccgttatttacacacaattaccgaacacacagtatatatatcgtatacatttttgaaccgaaaatgaacatcaacattcctaaaatacttccatcttttgatttttcaatccagtcacataaattgacactagtatcatgtttattaaccttaaaataatcgctttttttgttttggttacactgtaagtcgtgagaatccgtttttaagaatgtttatgtccgttccggttccccttaatattaattgtggatttttaccaaagaaaaatcgcaaggaatgcgacctaagacagatgagtcgcattctaaaacctcacatcccgatgttcgacgatcagccagtcacaattgaaacaaaaatctgaaagaatctgcactacataaaaaataaacaaaaaaatatacgaaaaggcgtacagttccttcggagttaaaatgtggctgttactattattattttactgtattttgagtgtgaatgtggaaaccgaagagctttaaataatttttgtaagttagaagtatttttgcgactaaggctaaggatttcggatattcgtatatatttacagatatttcactctttcatttcaaaacttttttctagaggaataatttatttgattatattttgggattcgtaattatctttgcgtttcaaactagtgtttttctttattatgttcggaaaacgtaatgcaattaacaaaatacctctaggtctatgatttcgatcttcttggcctgtagcaacataaggtgacatctagcggaaagatatacaaaatgaaaatgaacaatgtaccgtgtgtgaatgtgttggtaagcaaagacatttttttaactattatattataattgttaggcgatttgttgaaataatgttgtttttgcgcgaaatgatcagccgatagctcggtcccttgtataatatattatttgttggtgttatgggaccgtcttcggttgttgatcttcgcgttgagaaacaaagacgtggttgttgtggaagaaaaaaatgtattataccaaaacgtgtaggacgagtgttgcgagaaagagagaaagatagaagagagtgagatgtatcgattctcggaatgccttgtgtcaaggcgagtagtatcacttgtcccttatagtacaaactcgggaagtatagaatggtgttataggatataacgccttttgcctgcaaatattcgatttggttacttctgttgctataataatatatacattatccttatgaaatcgttagttattcactattctagaatacaaatatgactatagaaagttattttaacataaataactattcccggatgttttggcagtatcttaaaagacttaattcgtttctgcaaagttagtaagaattctcctcccatttaaaacaaaaaccttttgtagcctattcgctacttggatatcaagttttgtaaatacttggcattctttatttacttcaacaaacgttttgactcattgaatgtgcgtggatgtgtttttttataatcccgtaatagatccctttgagatttaaaacaatgacattcattttccgaaagacaatcaaacaatcaaacatcaatcctaaaatcatcacaatattggttctagaaggttttccattcctgtctatatcgaagaaatatctatattaatatttaagaaaatcgtatacatcaatcaatacgtttcaaggaagttgtctgtgcattatcatctgtaatatattttttaatgtgggcattagttgaaattgtgggtttagcaacatagacaaaaggaagtaaccaatcgagtattggggaaatgtaaaaaaactatttttgataaatattgtttgttggggaggatatttttttttgttagatttttaaaaaatttaaaatgtagcggggtcgctattttaaattgaaattaaaaaaattgtgaaaaaatggatataaattattttattgagaatataaatatatttattacttttgtgtataaaaaaaatgaagagaaaaaaaaattaaaatcgtttgtacagattttattaaaaaagtgtgccaaagtgcaagagatgttaccaagagagcttgctttatttatgatgaaaaaaaaatgttaagatttaaaaagggtacatatatttattttcggttaagaggaagaatagtgaacaagtgaacaaacgctccccaaatagtaacttgcatacgggaaagatatcacacacttagaagccgtcacatattaagtattaggaataaaaaacatcaacgtatcgtacaaactgaaaacgacttcaagtacaaagtgaacaaaaaaacacaacttatcggctacaaatatttttttacttagccaaacattagtaacttaaaatgctgtatttataatatattttcacaacatattcccagctaaaataaacgctcctacagttgatcttgtagtaaagacactatacacgtaattccttacaactaaatgatctacaaaaaaataatagtcacttaaacaatgttttaaagtagtattattgtttgtttaagcttgggaatatgttgtctcaatagtgtatagattttaggattttgaaattagctatttccaattccattgcgtttaaatgaaaggaaatagttaattttctgataccatatgtcaaaagttgtcctcgactgaaataaatctaaaaacatttacaaaagtttgataaatggtttttaaattgttaatttctcaatttaggatcttcttttgtcacatcctatatgtatatctatttaaaatgtatattaatttaaaaatgtttgtactggttgagaatatccgtagccacccctgtagaaagaaacacattcatccaatccatttttcacatacatttttaacatctatctgtctatttgaaagaaaaaaatctaacggtagtcaaaactgcgtgcttcaagtaatccaaaaatccaaaaagaaaaaaaaatacacattaacttggtccttctgtatcatcgaaaaatttcccttcgtcttagatattactaccacttcattttggcttttgatatgattttttattactcgaagcagaaatttttttcaatttcccacttttcatccaaaagtgacagtaagaaatgtaaaattcgaactgggctctctcacacgacattgttcaaggtagatttagaatgtagtgagtctataaagttttggagtgtagatatctcccttcaatacaggaattgccacccgagtacgtgttccctttctgaaaccttactgggaacaacttcgaactagtttttcgtggtcaatccattaatattcttaacattttactgaacgtgttgataagatcatatcattgtaattcctactacatttatcttcttctaaaggtgcgtatcttctggagatgttggcgaccacattgacccatcttattctattcacagcagctcgaaatagatcagttgacgttagaccagtccacttcctaagattg

SEQ ID NO: 72 - DNA, 2382 bp, Diabrotica virgifera virgifera
cgcgcaaattgtgcataagctattgtgaatggtggttttgtagttttaactttttaacttgaatctaaactaaattacaccaatatctataaaatcagttgtttaaaatggcacggagggattatgataaggataaagaacaactcaagacgtttttgatggaatattgtgtacaagatgtttctggtgtcaaaatctttaagtattcaaatcaattaacaaaattagcacatagggaacaagttgctatgtggatagaactggatgatgtgaacgattttgacgatgatctcgccagggctattcaagcgaatacaagaagatacagtacaattcttggcgacattgtgtttgatctgttacctacattcgttcagaaagatgtaatagccaaagatgctctggatgtttatattgaacatcgtttgatgatggaaaatagattgagacagccaaatgaacacagggaagctaggaataaatttccttcagagctaatgcgccggtatgaggtttacttccaagaccttactacaaataagccagtaccaatacgagaaatcaaagctgatcatgttggtcagttggtgacagctagaggtattgttactcgttgcactgaagttaaacctatgatgtgtgttgctacatatacctgtgatcaatgtggggctgaaacataccaacctgtcaatgctttgagttttatgccagctgatatgtgccaaagtgctgactgtaaaactaataggtctggtggaagattatacttgcaaacaagaggatcaaagttcattaaatttcaggaagttaaaatacaggaacatagtgatcaagttccagtgggtcacattccacgcactttaacagtattttgtagaggggaagttacaagacaagcattacctggtgaccatgttgctattaccggtgttttcttaccactattgaagcaaggtttcaaacagataatgggtggactgttatcagatacctacatggaagctcataaaataatttcgttaaacaagatgaacatggaaaattcagacaaccttcttacaccggaggaattggcaacacttacagaagatgatttctacacaaaattggcgatgtcgttagctcctgaaatttatggacatttggatgttaaaaaggcgttgttacttcttttggttggtggtgttgataaaaggcccgatggaatgaaaattcgtggaaatattaatatttgtcttatgggagatcctggtgttgccaaatcacaattgttgggatatatcaatagactggccccaagaagtcagtatacaactggacggggttcatctggtgtaggtttaacagcttctgtaatgaaagatccgatgacaggtgaaatgatgttagaaggaggagctctggtattagccgatcaaggtgtatgttgcattgatgaatttgataaaatggctgacgaggacagaaccgctattcacgaagttatggaacaacagacaatcagtattgctaaagccggcattatgacaacattaaacgctcgtgtatcaatcctagctgctgctaaccctgcctatggtcgctataatccaaagagaactttagaacagaatatacagttgccagccgctcttttatcacgttttgacttgctgtggcttattcaagataaagctgaccgtgacaatgatctaaaacttgccaagcacataacgtatgtccaccaacatagcaaacaaccgccaatggaaaccgcagcattagacatgaaagttatgaggaagtacatatctatgtgtaaaatgaaggatcctgctatacccgaggagttgacagattttattgttgctgcttatgtggatctaagaaaagaagcccgcaactctgccgatatgacgttcacatcagctagaaatcttcttggtattttgcgtctgtcaacagctttagctcgcctacgtctatcaaatgttgtagaaaaagatgacgtaaatgaagcaatcaggcttttagagatgagtaaagattctttgaaacatactctgcaaaacaaagggcacagaccaccaaatataaatgacaaaatatacgcactcatcaccgagttggcaggcgatacaaaaactgttgcagtgtcatctgcattggaaaaatgtgctagcaaaggttacaatcctgatcaggtggacgcttgtatagaagaatatgaagaactgaatgtttggcaagtgaaccaaactagaaccaaactcacttttatttagtgtaaatttaattttaaggttattatcgttaagaagtgtcttaatataattgaattaagagtttttagacacatcactttgcatttttttgtatgaataaatattttttaaataa

SEQ ID NO: 73 - DNA, 2792 bp, Diabrotica virgifera virgifera
  misc_feature (2558)..(2598): n is a, c, g, or t
acatacagatgagcacattgaagaatgcgaaaaaatggaccatagtcaaaacgagactagtaaagttgacgaagaaaataatttagaaagccgaatagctgatatgaaattagaggagagccaagtatccgtacataatatagttactaagacggaaagtgaaaaatctagcgaaaatagttcgccaaaaaaaggcaagtctaaaggaacattagaaatagaaagcagtgaagacaacaaaaaaagtagttctaaaaataaaagtacaaggagttcatcggaagataaaaatacgaaatcacctgaagttaaagctaaaacgctggtaccgatttcattatttcttgaagatattgccaatattccggtacttaaaaataaaagaaagcccaggtcaagatctaaaacaaacgaaccggtttcacttaaacctgaaagtaaaccagtcactaaaccaacaaaggcccaaaccgataaagctacttttaaaatgaaaaaggacaccaaaccaaaagagccaaaaagtaagaagacaactcctcagaaagaaaaagatgacagtaaagaagctggtaaactgggaaagggcgacaagaaagtcgcaaaatgtgaagaacctgctaaaatcggcagtaataaatctgaaagtgaagcagatgatgaaaaagtgaggagatcttcgagaatcaaatccatcagtgtccttaataagaaaaccactggctggggcttggttaaatcaaaatcagaatcctctgtgttcgaaagcgacgtttcagatagcaactcctttcaaactgagtcagataagagcacacctacagcatctcccaaagtaaattcaaaggaccgcaaatggaagcctttttcggacactcagtctcctaccatcaagtcagataataaggtcatgatgccgttcaaatctgccgtagatctcaacaaaagacctcataaagatcccgtggtagaaggcaggctgaagcagttcgtgcatctcaaagagaatcaatacaggaccgataggatggtttgcaaggaagctaaaaaaatggtttgtgattgttttttaacttccgaagagctacttgctaacgagtacggatgcggggaagattgtctgaataggttgctattaatcgagtgcggaagtttatgtgttgttggagacaggtgcacaaacaaaagattccagaaaaatgcttttgctcctgtcgaagtcttcaataccgacaagaaaggtctgggacttagagctgcagctaatattcccttcggtgaatttatattggaatacgtgggagaggtcttggacagtgatgaatttgacaaaagggctgaagtttattctcaggataaaaatattcattactattttatggctttgcgagctgacgccatcatcgatgccaccatgaaaggaaacatctccaggtttatcaatcactcctgcgatccaaatgcggaaacacagaagtggactgttaacggtgagttgaggattgggttttttagtaccaggacggtcttggcaggcgaggaaatcacttttgattatcggttccaaagatatggcaaagaagcccaaaaatgctattgtggcgcaggtatttgccgaggttggcttggcgaacaaccagattctgatgaagaagaggaagaagaggaggaggaggaagaagaagaagttgaagaagctaaaccaattctacctgagcttcctctaccagataaaaccggaatattggaaatacctgttccagcagaagttaaagacgaagaaaaagtggaaggtgttccggaaattccgaaagataatgaagccgccagtatacaagaaactcctcaaattgttacagagatcaagccaaaacctgccaagaaaaaactccagaagaagaaaccgagaattgaaatgttcgaagaagtagatcacttaaatgaagaaatagagatgttggttaccactggattgaaaaatcaagctcatactctcaaattgagcagattgatggtgcgatctaaagaacctcaacagagagcgaaactcttacgtgttttgcgaagaggagagctaccttgtaggaggttgttcttggattatcacggtcttcgtttaatgcatggatacatgatcgatgctcagcagttggtattaacaaacaaacaatttgaatcattgagattggaaatgcttcaaacactagcagtactgcccattcctaataaatcgatgcttcaagatagcaaagttatttctactgtagaaaaatgggccaccagtaagtctttaacttcgccgctcgattccgaaagcaactcaccaaaaacagaaacggactctaacggtaaacaagaaatcaaagtgccagtgaaagatgaattggtttcggacaagaccatccaagatcaagaggaagaaatcaaattcttagccagcaaactcttggaggagtggaagaatctgaaagaagtttttaggataccgaagaaagagcgtatagagcaaatgaaagagcacgaaagggaagctaataagaaatataatatgcagaccnnnnnnnnnnnnnnnnnnnnnnnnnnnnnnnnnnnnnnnnngaatatctaaaattaagtaagtcggagcgaagaaagctgtttgcgttacaacatgagataaaagaagaagagcggaaactgaaacaaagagaaatgtggagggaacatgaaatgaactgtatgatgataggagctgatcccagattcaccgcaccgttcgatcccaacagagggtatcaattgatatggaatcc

SEQ ID NO: 74 - DNA, 1513 bp, Diabrotica virgifera virgifera
accagtcactaaaccaacaaaggcccaaaccgataaagctacttttaaaatgaaaaaggacaccaaaccaaaagagccaaaaagtaagaagataactcctcagaaagaaaaagatgacagtaaagaagctggtaaactgggaaagggcgacaagaaagtcgcaaaatgtgaagaacctgctaaaatcggcagtaataaatctgaaagtgaagcagatgatgaaaaagtgaggagatcttcgagaatcaaatccatcagtgtccttaataagaaaaccacaccagtcactaaaccaacaaaggcccaaaccgataaagctacttttaaaatgaaaaaggacaccaaaccaaaagagccaaaaagtaagaagataactcctcagaaagaaaaagatgacagtaaagaagctggtaaactgggaaagggcgacaagaaagtcgcaaaatgtgaagaacctgctaaaatcggcagtaataaatctgaaagtgaagcagatgatgaaaaagtgaggagatcttcgagaatcaaatccatcagtgtccttaataagaaaaccactggctggggcttggttaaatcaaaatcagaatcctctgtgttcgaaagcgacgtttcagatagcaactcctttcaaactgagtcagataagagcacacctacagcatctcccaaagtaaattcaaaggaccgcaaatggaagcctttttcggacactcagtctcctaccatcaagtcagataataaggtcatgatgccgttcaaatctgccgtagatctcaacaaaagacctcataaagatcccgtggtagaaggcaggctgaagcagttcgtgcatctcaaagagaatcaatacaggaccgataggatggtttgcaaggaagctaaaaaaatggtttgtgattgttttttaacttccgaagagctacttgctaacgagtacggatgcggggaagattgtctgaataggttgctattaatcgagtgcggaagtttatgtgttgttggagacaggtgcacaaacaaaagattccagaaaaatgcttttgctcctgtcgaagtcttcaataccgacaagaaaggtctgggacttagagctgcagctaatattcccttcggtgaatttatattggaatacgtgggagaggtcttggacagtgatgaatttgacaaaagggctgaagtttattctcaggataaaaatattcattactattttatggctttgcgagctgacgccatcatcgatgccaccatgaaaggaaacatctccaggtttatcaatcactcctgcgatccaaatgcggaaacacagaagtggactgttaacggtgagttgaggattgggttttttagtaccaggacggtcttggcaggcgaggaaatcacttttgattatcggttccaaagatatggcaaagaagcccaaaaatgctattgtggcgcaggtatttgccgaggttggcttggcgaacaaccagattctgatgaagaagaggaagaagaggaggaggag

SEQ ID NO: 75 - DNA, 1901 bp, Diabrotica virgifera virgifera
gttgaaaatagaggttatattagagtagaatgcacagttttttaaatttttgtagatttaaatattcggaaaacaacttaaggaatgcttgttcaattttatgtctaaagaagacaagcaaatataagactgttagacatttttctgttgaaaataagatagtaaaagatgagaaacctgaaaaatttatacccttcctgcagaggattaacctgaggcggtcagaagcgagaagaagtatggttgttcaagtacaatctacacaatcgtttaaagaattatattcctattgcaatgctataggaaaaataaaatatatgttccattattctgtagggattgagcctttgcacttcataatcgtagaatttgaaactgatacagatatcacgaatattaagaagtcaagcatatttgttgaaggaagcttgggactacctacacagtcacattttgtgtggtttagggccgcacataaaaaattaccaaaattaaaacaaataaaatctgcctgtctgacagtagaacatggtactgcgattaaagaggaagaaacaatcaaggaaatgttaagcaaatcagaaaatatttcagatcagataaaaactctccatgaaattactaaattaaatgatgttggtacccgtttaaggtttttaactgctctccaaattgaagatgcagtcaatggaatgtttcctcatgcagttgcttatccttttggatccagtgtgaatggatatggcaaaatgggatgtgatctggatctatttttaaagttagcagctgacaagcataataatgaaaatgggaggctagtatttcattgtaaaccacttaatggttcggaaagaactatgaaccagaggtacatggagacattgggtgatttaatctatctttttttacctggatgtggacaagttaggagaattctacaagctagagtaccaattgttaaataccatcaacagttaacagatgttgagtgtgatgtatcaatgacaaatatgtctggtgttcacatgtcagatttattgtatataatgggagaacaagatgaacgagtaaggccattgatatttgcaataagaaagtgggcgcatattgctggaattacgaattcgtctccaggaagatggatttcgaatttttctcttactcttctggttctcgcctttcttcagaaccctttaagtggaaaaccagtattgccatcattaaataaattggcggaattatcaggtcctgaagacaaatttcaattagaggacggtacggacgtctccttcctaagagatataagaaaatacaaaaccaaaacaaaaaatacggactctttagaacagttgctgaaggaattctttgagtattacgcccattttgacttcgaaaacaaagcagtatgtctgaacgagacagtaaatgtaccaaagccagaatttagccctatgtatataataaatccattagaaaggggtttgaatgttagtaaaaatgtaagttccgacgaagttgtaagatttaaaaacgaagttagaaatgcggcatgggtgttagaatcgcaggagtccaaatcggcacattggggtcttctttccattttgcaaaataaaagaacaaatagtatattgcaagcagtttctggtcattctcaacctgggaggttggtagaagttagtaccttatttgaaaatgaaaatgaggataacaaaaaacaaactaaaagaaataacatgaagaatagccagaggttgtcccgaggacgagaaaaaaacaactataaaaccattaacagaagattcatatcttaaggaaaaatgtatgattctacaacacgaaaagagtccattaaataataatatggaagttcaatctgaacaaggactttaccactgtga

SEQ ID NO: 76 - DNA, 7638 bp, Diabrotica virgifera virgifera
tgtgtgttgcgtgagttctgtaattacaatgagtgtgataaattaagtgaagaaagttcattaaagactcgatgatggtcttggaccataaaaaatttagttattttttaaaaccaaataagactttttggataaaaactcagcatatacctaagaaagcttcaagcgtatttgaagctttcgaggccgtgttcatggaagtatgaacctagactcgttgtctttcactttgtcacaaataagttatttgattgccacattaactaaaaaaaactataagcaagtagtaggagacataactaaacttgtttctttgcatggtctggaggcggatcgtcacttgctccaatgtctgttttcatcagtggacttttcagagtctacaaataaaatatcagctccagctccccaaaaccaagcattattggaacagtgctccagtttgttaaacaagccatcattgttaacagccctttgttatattacagacaatcctttgataaatcacaagactttaaaacttggacctcaattcttccatcagttgagcaagtgccttcgcctctcagctgtccaggaagttgtttttgccattgctctttgccactcatctcacacagaagccagaaatctagcccaagctcacttaagaactacagtacctgccttagttcagtcatatatcgatacagaaggaagtagcagtcaacacgaaggtggacttcacgaaacaactcctgaagtacttcacctcattatatctgctgttctaaaaaaccctaaggaagtaggtcttactaacgacaaccatacaacatttcttgaaaccttacaacgagattttcccaaggatcttgtacccgtagtgcttgcgccattagtgtatccagaacatagtgaattggccccagaaatgtcatctgaaggccccggtttatccgggggaatgcttgaaacatctttatcagatgtagtgactgaattaggatataattttacgtcgtctgttgaagaatgccgcaacaacctcatgaaactgggtggcagagatatttcccccacagtagtatctcgtatccttgctgttatgtgccgaacacacagtggccttgaagactctatttccattcaaacaccaggatcttttaataaaggatctgataatagaacatcatggaacattgataacttaattcaagctcttaaagaaattgttcctaattttcagtggaatagtattgttgctgaactagatcatcctgagttcattgtaaaagataggcaaggattgtgtctattaataaatggacttaggcaaggcttgcaaacatttggttttcacccagaaacatttccagtggatcagatatataaaagatggcaaaatgtggaaggacagtttagtttaattcagaatatccttaaaaatccagatgtgttttgttttgtggactatacttacgcacctgtggcagttgatgtgctaaaaactccacctgagcaagacagtaaagaattagcaaactggagatctttgaaccttgttgaacttttgttgagcctatcagaatgtgggttatatacacatgttcaagaactgttcaaaataccagtacatagttgtccagatgtactagttttagcattacttcagatttctggccaagttactttactaagacgcgacttgctcactaacttgatccccatatttttaggaaatcatcctaactctgccataattttacatcatgcatggcacacacagaacatcaatattaaacccattattatgcatgctatggcagaatggtatgttaggggggaatgtgatcaaacaaggctgtccagaattcttgatgtagctcaggatttaaaagcactatcaagtcttttgaatgcacaatctgcccagtcatatcctttcattatagatttagcttgcctagcttcacgaagggagtacttaaaattagaaaaatggctttctgataaaataaatgaacatggagaggcttttgttatggcatgtgtaaaatttttacatagacgtgttccacagatatcaaaagcagatgaatcgctaggcaaagttgttcccttgcctacagaaactttgactacaatgacattatgtctgcaaaggactatgaacaatttaagtccagagtgtcacgatgctgtaatgacaacagttaataactgttctttgattataaagtccagacaacaacagcaacctgctatacttcgatcgagaggaatagatggaggaataaatccttcagtttttgctcctctctataaccattctggagttgattctatgcaaggacttaacacgacattggcaaatatgaacttaggtggtcccgcaaattctgcattcaacttacaaggtggattaggacctttggtaccatcaccaggatctccctcaagaattttaaatgctggcccatcgagtagtccttttcccattatgccaatgtcacatcaacgccctgctggtacaagttcgtctctagtcctaggagtcaatcaaattagcaacttaagtaggatgggacccaatactaacatagacaagactagattgccagaatataacttgttcccggatgtttcttcacatgtttcgaaagacatagaagatgaagccaataattactttcagaggatttacaaccatccacctaatccaaccttgtcaattgaagaagtgttaaatatgttgaagaggtttcaagattctcataacaaaagagaaaaggaggtgtttaactgtatgttgaaaagtctttttgaagagtacaaattttttccacaatatcctgataaagaattacatgtaacagcacaactatttggaggcataatcgaaagaggtatagtcgctagctatgtcgccctgggactggccttacggtttgtccttgaggctctcaaaaagccagagggttctaagatgtactattttggaatagcagctttagataaatttaaaacatgtttaaagcaatatcataaatactgtgaacacgttcgagcaattcctcacttcagtgattttcctcaacatcttcaagagtacgtagaattcggattacaaggtttggaaccacctcataagccagacggaccaatattaccaccaagtctagcagccatgttagcgcctcctagtgctgtcactgtgtacaagactactaccacggcaagtactgttcaaaccaaagtcaatactacaccagcaggtacaatgagtagcagaccttccatagcaaatgctacaaatattgatacacttttggtagccactgagaaagaagaaaaagccactgctccgcctgagcctttacaagacaaaactgcctttatttttaataatttaagtcaattgaatcttaaacaaaaatgcgatgaacttaaggaattagtatctgatgaatattatccgtggcttgcacaatatcttgtaatgaaaagagcatctattgaatttaatttccatgggttgtattccaacttcctggatacactaggaataaatgaaattctaaaattagtaacaagggaaacattcagaaatattagggttctcttaaggtctgacaaggcagtagctaatttttctgacagatctcttttgaaaaacttgggccattggcttgggcttttaactctagccagaaacaagccgattttacaaatagaccttgatctgaagtcacttctagtagaagcttaccataaaggacaacaagaacttttatatgtggtaccatttgtagctaaagtgctagagtcatgtgctaaaagtaaagttttcaaatctcccaatccatggacaatagctttaatgaacgttttagcggaattgcactcagaagcagatcttaagctgactttaaagtttgaaatagaagttttatgtaagcatttggatatagatgttagccatttgaagccttctctataccttaaagatccagaacgtatcagaaaaatcgaataccaactatcacaaccacttaagaaagaagttttgatgcaacctagtgttgtcaaccaaggaggtaatttaacggaccaggaattagcaaacatcattccaagtcaacaaaccagttctccagtcattcagaataatagtacaactccaacatcagctttgtcggcgcccccagagcctcgttttgcatactcagacattcaaatacccggaatgcagtcatttcagacccacactgtcatctctccttcaattttgttatttcaaacccagccacaacttaaagcacttgtgcgcacttccattgaaagggctgtgcaggagtggataggaccagtagttgacaggtccattaaaatagcccttcaaacatgcgaacaactcataaggaaggattttgcacttgatccagacgaaaaccgaatgcgactagccgcccattacatggtacgcaccctcacagctggtatggcgatgattacatgccgggaacaattgataacggctatcagcacacatttaaaacaagcccttttaaccaatatggtgtcacctacggtccagcaaaaagagatgatagatcaggcgtgtagtgtcgtcgccagtgataacatggagctgggttgtgcttttatacagaaaactgccgtcgaaaaagctatacccgaaatcgataagagactcgtcagcgaatatgaactcaggaaaatggctcggcaagaaggaagacgttactgtgatcccatagctttaacttatcaagcagaaaggatgcccgagccaatacgactaaaagtaggaggtatttcgcagagtcaaatgggcgtatatgaagaatttggacaaaacatcccggggtttgtaccgaacgaacgtgatgctactatgctaatccaaaaacaaacacccatcgaggtccaatctcactcttcgactccatttccgattccacagaatatcttacccaccgacgatatagctatattatacgaaaagttggccatcgatgtagaacaatttgtgcaacttttagggcaagcacaggctctgatgagtagcagtatggtgcttattagggattgtctattgcatatgtcgaggaacagggactcaactcctccccaagctattgtacaaaagtgtgtagaaagcttgcaagattgccttgttccaactttaagtaatgacaatgacccagttactctccgttttaaagaaatcatagtaagaattctcaaaacccttcaagatccacgattatatggccaacaatggaccaacaaattggtaacgagatgtttaaccgaatgccgagacgatcaactacgctacaacctcgatgctgtcgatacattaatcaaaaatggtttagtcaatgttccccagtacgatcttgcacttacacaatgtatggagaatggccataactacatggctaccacttttgctacgcagttactacagttgtatatagtagacgatagaaacgggcaacttgttactgaaagtgatttgtgcaacacgattgagattttagccaaaattaacacccattctagaccacaaccagaaggattaggaaatattatggatgcattgagacagagcgaaccgagctcattttttggagaccgcgcgccaatgggacccactgttcatatccataacggaatcctacaggtgagagcgccgaattatgaagatcctccaggtctagtagagaaaactgatcaccttcttcgagagtggatttctttttatcacggccagaaccagggtcgagattctaccaaagcttttagtgttttcgtccaccaaatgaacgtctacggcatcctaaagactgacgacttaattacgaggttttttcgactttcgacgcaactttgcgttgaaaccgtgtacagagtccttgcggaaaaatcgaccacaaatgtatcattattgaggccgaagtgctatcaaaccttagacgcttacgtgagattggtggccttattggtgaagcattcaggtgatgcaaataatacaaccaccaaagtgcatcttctaaataaggttcttggtattttagcaggttgccttatgcaggaccatgacactcgtgctattgaatttcaacagttgccttatcagaggatattcactatgttgttcttggaactaaatgctccagaacccgtcctggaagccattaatttccacgttttgaatgctttttgtcatacattacacatcttacggcctacgaaagcagcaggtttttgttacgcttggttagaactggtttctcaccgagtctttatgggaaggatgctagccagtagccctcagcaaaaatgttggccgatgtatgcccaactcctcatcgaccttttcaaatatttggcgccgtttttgaggaatgcagagctggccaaaccagttacgatgttatatagaggaacactacgagtactgctcgtgttattacacgactttccagagtttctatgtgattatcattatggattttgtgacgtaattccgcccaattgtattcaaatgaggaacctcatcctctctgcgtttccaagaaacatgaggttgccagatccatttacacctaacttaaaggtcgatatgctaccggaaatatcgtatgggccgagaatacttacaaatttagcacagatgatcacacctgctcaatttaaaaaagatgtggattcgtatctgaaggcaagggcaccggttacgtttttgtcggaacttagaagtaacttacaggtttcaaacgaacctggtgtgcgttacaatatcccgttaatgaacgccttagtactgtatgtaggcactcaagcgataacttatatacggaacaagggccacacgccgaacatgtcgacaatagcacacagcgcccacatggacatctaccaaaatctggctgtcgatctggacaccgaaggtcgctatttattccttaacgctatcgcgaaccaactgaggtatcccaacagccatacacattatttctcttgcactttgctctatttattcgccgaagccaatacagaggccattcaagagcaaatcacaagggtattattggaaaggctaattgtaaatagaccgcatccctgggggctactgattacctttattgaactcatcaaaaatcctacgtataggttttggcagcatgagttcgtccattgtgctccagagattgaaaaattattcgagtcagtcgcaagatcttgtatggtaaaatccacagcgcaagcgcaagaaggcgacatacaagagtgataagcatttttgtgatttgtatatacttctataaaaattgaacgattgattgtgacttttttaattttttgttaataattgaaagcttaattttgggagcaacgcattttatttttagaatctaaggtgattatagtgtatagagattaattagtgtaatatattagctatttttaagaaaattttcaagtatttgtaactagtatacatataaatgtggatgtaataaatggttttcaatgttttgagcattaaaaattgtctgattttttaatgtgcccaattacctttcctcaaagacttgaattctaacgaaaattttgggaaat

SEQ ID NO: 77 - DNA, 5122 bp, Diabrotica virgifera virgifera
gaactgtcaattggctagaagctccgaagtgtccgaagcttggtttcatggtttctcgaaagtttctctctagactctagacgcaagtctaaaagcgtattggaaaaaaataaaaaataattcacagaaaaaaaaaacaatccaaacatttggttaaaaaaacttgttcaaaatgggtgttccaaaatttttccgatacataagtgaaagatatccatgtttaagtgaattggtaaaagattatcagattcctgaatttgataatttatacttggatatgaacggtataattcacaattgttcacatcctaatgatgaagatccccacttccgaattactgaagagaaaatatttaaagacatcttccattatattgaagttctgtttcgaatgattaaaccgcaaaaggtgtttgttatggcagtggatggagtagctcctagagctaaaatgaatcagcaaagaggtaggagatttagatctgcagctgatgcagccaaagctgaagcagaggcagtaaagaaaggagaatcattgccagccgaagaacgttttgattccaattgcattacacccggtactgtttttatggctcgtctgcaagaacaattgaaatattttgtagttgataaaatttccaatgatcctctatggcaaaagtgtaaagtgatactgtctggacacgagacacctggagaaggggaacacaaaataatggactatattagatatactagggcgcagcccggttatgacccaaacactaggcattgcttatatggacttgatgcagatttaattatgttaggactgtgttcacatgaaccacattttagtttattgagggaagaggtaaaatttggcaaaaaatcgacaaaacgtataacagttcctgaagagataacattttttctgttgcacttatctctaatgagggagtatttagaattagaattcgccccaataaggtatgagctaagaggatttgactacgatttagaaaaaataatcgacgattgggtgttgatggggtttttagttggaaacgatttcattcctcatttaccaaatttacacatctccgagggtgcgttacccctcctgtataaaacttatatggaaatacttcctacgctagatggttatataaatgaaggtggaactttaaatttaaggcggtttgaaatgttcatggaaaaacttggtcagcaagatctagatcactatgagcaggtacgagacgacataatgtatctagaaacgaaaaggggcattaagtccacaagagatttacaagagtggaaagcggagggggatgagatttctgaacttcttgaaccagatgtctcgacaccttgtaaggacagtggcttggcgagtttgttgaagtctgcagatgagctgtgtttggatgatgacagtgacgataatagtgatgattttatgaattttaaaaaggagtattacaaagagaaaatggaatatgttgacgttacacccgaagtaatgagggaccaagctgaagggtatgttcgagcaatacagtggaatttaaactattactacaatggttgttgttcttggtcttggttttatccacatcattatgccccatatatttcggatatcaaagggtttaccgacttaaaactcgagttcgatatgggcaaaccattcttgccatatgaacagctgttaggggtgttacctgcagccagtaaaaagcttctgcccgaagcttatcatgggttgatgactgaagaaaattctatcataatcgattactatccagaaaaatttgaaactgatctgaatggaaagaagcaagcgtgggaagcagtagtaaaaatacctttcatcgacgagaaactgcttcttgaagctatgagctattgcaacgataaattaacaacagaggaaagacgaagaaatagtcacggacctatgttaatttacatgtacacgccaagagatagagaaccttatcaagcaccagcctattttccagaaattcccaaaaatcacacagaagtgaagactttattgtattcagatattttaataccacgagaaaaattagtaaagggtgcttatcccggagcgttaatgaatgtttactatccgggcttcccaaccatgaaacatcttaaatataggggagaagttcaaaaagcccatgttaaggtatttgaacagccaagtagaaatgagagtatgattattcatatcataccaaattctaaattcgtcggtgacatgattccagttgatcttttgggtacatctgtattcatttcttggccacatctaattgaagcgaaggtagtggctatttcaaaccttaacaagaaatttatcagtatgggtggaccaaatcagtataacacaattaatcttaaggaatcagacaaaagagaatttatcctaagtttaagtggaattactgaattatacaaaaacagaatggggatagccataggtgactcaaaagttttagtgtatgttaaaaaattagtaggaagaaaatactcattttcaaatggaaaattcaaactagaaaagcagttcgccgataatatttcatgttatcccttgcagacagtagtttttaatataaaggcttatgatccattgtatcatttagaaaaagaagtggaaagtatttatccgaaaaacagtacttgttttgtactcggaaatccttattatggttctcaaggagtggtactggacgcctcaacagttactaaaactggcagaataaaaatatatatttcgatagtagaacagccgaatttgaaccatgttagatctatacatgagaacactgacaagaaatacaaacaagcgcatactgttgctagtcctttaggtatttctaatagtattttttcacaaataactacctcgatgtatattaaagctagtgaagctgttgaagcaagaaaagttaatgttggcttggatttaaaattgaacaaaaggaataaggaaacgcctggttataccaaaaagataaataattattggtattacacagagaaggccgcagaacttgttaaagaatatattgacaaatttccagaagtggtagattatttaaacaagccttatgaccacgacgccacgtttgaaagtttatttccaacaaacagcgaagaacgatataaagaattacagcagtggttaaaatctttacctactcattccatagataggatagattgtaatagtaaaagtttggaaccagaaactatcgaggctttagaacgaactatagatgcttataaagacgcacctgtaaaacataggaatatccaaataaaaccacaatttttgtataggcctgaaattcaaaccgcaactatagaaccggatccaaaaactgaaactgatattctagatagaatagttaacgtaaggcatgggtactcagttccatttgggcataaagggacagttactgcaataagaaattctagtactaacaacgaaagggacactatgtatgaagttgtattcgataatccatttcgagatggcttaaagttaaattgttcagaaaacagaggatatctgctgccgaagactgcctttataaatatatcttacggcgaacgtttgatggtggaaaagactggaaagccagatgagctaatcgcaaaagccgaagctacaaactctaaccgattagaacaacctaaccataacaacacgtttaataacttaatcaaaccacaaccgcaatcgatattccatccacctcaagttcaaccgtggtttagccagcaaaatcaggcacaatcatgcatgattcctccccaatttatattaccaagtaatcaacctaattcagcgtttgctcatttctcatcaaacaacacatttaggatgccaactgtacataataatctcggaaatactgtgcctaatcagttttatccatttgacaacaatcaaactcaaaatgagaaaataatcaaagataatagatacgtaaatgttccaaattttgaaaaggtacttaaagacaacgtgtctgtaagtaatcataaaggtactgaaaatattgaaaggaatggtttaactggagaaatatttcctatgaaagatgtgaaaaagctttctcaggataacaacattcagctgaaattaatgaaacctgaagattttcaaaatcctccagagaagccacttgtcgaaaattggagagaaagaccacactcacatcagaatcatttacatactcaacttgatggtaataagagcaaagatggtgataatagatataatttttataaaaccgataataacaaaaaggtggataataaatcacagtcagaggacgataaaaccaaggctggtagttcaagaaaggctccaatgacagtcgatacggattacttaaagagtattttaggaataggtaaaatcgaaaatgaaaaacgtacgatggaaagtacaaaaaataattctgatgttagctgtccaaaggttgtccaagataaagcaaaatcgccaaatctttcatttgatatgttagcgggacagtcttctgatctgatagacaaacatgataatattccggcccctccaaaaacttgggtacaatctggaagtaaaaaagagtcacctcaaaaaccgaaggacaaagtcaaacctactaacagtgaaacgacggctgtactaaacaattcgtttgtccctctacaggctgtcaaaaatcatattagtaaagttagtagcagtggtaaatctaatgataatagtaaagacttatcaagtacaaatggaaaagatggacgacgggaattgtgtaaaccacaggaaaatcaggaaaaacggaacacatcgagcggtaatcaagaaatgtcaaaaaaggaaaggaaaaccagaatcgctgccaattttgtaattaagaactgaagcaggatttgtaataagagatatatttttacaatttaacaagaattttagtttagatttaagatttctaataagatctttttcatttgtaattgttagttaacatgaaaataatttgtaagattttgaaattaagttcagactaatcagtttgaaaaaagtaatcgataaataaagttttgaaagattcactaa

SEQ ID NO: 78 - DNA, 5274 bp, Diabrotica virgifera virgifera
tccgaagtgtccgaagcttggtttcatggtttctcgaaagtttctctctagactctagacgcaagtctaaaagcgtattggaaaaaaataaaaaataattcacagaaaaaaaaaacaatccaaacatttggttaaaaaaacttgttcaaaatgggtgttccaaaatttttccgatacataagtgaaagatatccatgtttaagtgaattggtaaaagattatcagattcctgaatttgataatttatacttggatatgaacggtataattcacaattgttcacatcctaatgatgaagatccccacttccgaattactgaagagaaaatatttaaagacatcttccattatattgaagttctgtttcgaatgattaaaccgcaaaaggtgtttgttatggcagtggatggagtagctcctagagctaaaatgaatcagcaaagaggtaggagatttagatctgcagctgatgcagccaaagctgaagcagaggcagtaaagaaaggagaatcattgccagccgaagaacgttttgattccaattgcattacacccggtactgtttttatggctcgtctgcaagaacaattgaaatattttgtagttgataaaatttccaatgatcctctatggcaaaagtgtaaagtgatactgtctggacacgagacacctggagaaggggaacacaaaataatggactatattagatatactagggcgcagcccggttatgacccaaacactaggcattgcttatatggacttgatgcagatttaattatgttaggactgtgttcacatgaaccacattttagtttattgagggaagaggtaaaatttggcaaaaaatcgacaaaacgtataacagttcctgaagaggtaaaatttggcaaaaaatcgacaaaacgtataacagttcctgaagagataacattttttctgttgcacttatctctaatgagggagtatttagaattagaattcgccccaataaggtatgagctaagaggatttgactacgatttagaaaaaataatcgacgattgggtgttgatggggtttttagttggaaacgatttcattcctcatttaccaaatttacacatctccgagggtgcgttacccctcctgtataaaacttatatggaaatacttcctacgctagatggttatataaatgaaggtggaactttaaatttaaggcggtttgaaatgttcatggaaaaacttggtcagcaagatctagatcactatgagcaggtacgagacgacataatgtatctagaaacgaaaaggggcattaagtccacaagagatttacaagagtggaaagcggagggggatgagatttctgaacttcttgaaccagatgtctcgacaccttgtaaggacagtggcttggcgagtttgttgaagtctgcagatgagctgtgtttggatgatgacagtgacgataatagtgatgattttatgaattttaaaaaggagtattacaaagagaaaatggaatatgttgacgttacacccgaagtaatgagggaccaagctgaagggtatgttcgagcaatacagtggaatttaaactattactacaatggttgttgttcttggtcttggttttatccacatcattatgccccatatatttcggatatcaaagggtttaccgacttaaaactcgagttcgatatgggcaaaccattcttgccatatgaacagctgttaggggtgttacctgcagccagtaaaaagcttctgcccgaagcttatcatgggttgatgactgaagaaaattctatcataatcgattactatccagaaaaatttgaaactgatctgaatggaaagaagcaagcgtgggaagcagtagtaaaaatacctttcatcgacgagaaactgcttcttgaagctatgagctattgcaacgataaattaacaacagaggaaagacgaagaaatagtcacggacctatgttaatttacatgtacacgccaagagatagagaaccttatcaagcaccagcctattttccagaaattcccaaaaatcacacagaagtgaagactttattgtattcagatattttaataccacgagaaaaattagtaaagggtgcttatcccggagcgttaatgaatgtttactatccgggcttcccaaccatgaaacatcttaaatataggggagaagttcaaaaagcccatgttaaggtatttgaacagccaagtagaaatgagagtatgattattcatatcataccaaattctaaattcgtcggtgacatgattccagttgatcttttgggtacatctgtattcatttcttggccacatctaattgaagcgaaggtagtggctatttcaaaccttaacaagaaatttatcagtatgggtggaccaaatcagtataacacaattaatcttaaggaatcagacaaaagagaatttatcctaagtttaagtggaattactgaattatacaaaaacagaatggggatagccataggtgactcaaaagttttagtgtatgttaaacaattagtaggaagaaaatactcattttcaaatggaaaattcaaactagaaaagcagttcgccgataatatttcatgttatcccttgcagacagtagtttttaatataaaggcttatgatccattgtatcatttagaaaaagaagtggaaagtatttatccgaaaaacagtacttgttttgtactcggaaatccttattatggttctcaaggagtggtactggacgcctcaacagttactaaaactggcagaataaaaatatatatttcgatagtagaacagccgaatttgaaccatgttagatctatacatgagaacactgacaagaaatacaaacaagcgcatactgttgctagtcctttaggtatttctaatagtattttttcacaaataactacctcgatgtatattaaagctagtgaagctgttgaagcaagaaaagttaatgttggcttggatttaaaattgaacaaaaggaataaggaaacgcctggttataccaaaaagataaataattattggtattacacagagaaggccgcagaacttgttaaagaatatattgacaaatttccagaagtggtagattatttaaacaagccttatgaccacgacgccacgtttgaaagtttatttccaacaaacagcgaagaacgatataaagaattacagcagtggttaaaatctttacctactcattccatagataggatagattgtaatagtaaaagtttggaaccagaaactatcgaggctttagaacgaactatagatgcttataaagacgcacctgtaaaacataggaatatccaaataaaaccacaatttttgtataggcctgaaattcaaaccgcaactatagaaccggatccaaaaactgaaactgatattctagatagaatagttaacgtaaggcatgggtactcagttccatttgggcataaagggacagttactgcaataagaaattctagtactaacaacgaaagggacactatgtatgaagttgtattcgataatccatttcgagatggcttaaagttaaattgttcagaaaacagaggatatctgctgccgaagactgcctttataaatatatcttacggcgaacgtttgatggtggaaaagactggaaagccagatgagctaatcgcaaaagccgaagctacaaactctaaccgattagaacaacctaaccataacaacacgtttaataacttaatcaaaccacaaccgcaatcgatattccatccacctcaagttcaaccgtggtttagccagcaaaatcaggcacaatcatgcatgattcctccccaatttatattaccaagtaatcaacctaattcagcgtttgctcatttctcatcaaacaacacatttaggatgccaactgtacataataatctcggaaatactgtgcctaatcagttttatccatttgacaacaatcaaactcaaaatgagaaaataatcaaagataatagatacgtaaatgttccaaattttgaaaaggtacttaaagacaacgtgtctgtaagtaatcataaaggtactgaaaatattgaaaggaatggtttaactggagaaatatttcctatgaaagatgtgaaaaagctttctcaggataacaacattcagctgaaattaatgaaacctgaagattttcaaaatcctccagagaagccacttgtcgaaaattggagagaaagaccacactcacatcagaatcatttacatactcaacttgatggtaataagagcaaagatggtgataatagatataatttttataaaaccgataataacaaaaaggtggataataaatcacagtcagaggacgataaaaccaaggctggtagttcaagaaaggctccaatgacagtcgatacggattacttaaagagtattttaggaataggtaaaatcgaaaatgaaaaacgtacgatggaaagtacaaaaaataattctgatgttagctgtccaaaggttgtccaagataaagcaaaatcgccaaatctttcatttgatatgttagcgcaagttgcgaaaattcctgccagtgtaagattattaacttactaccagtcaaacggtttaggtacaccaaggtatcaatatttctcgatggaaaacaatatgatcaaagcccaaatgacatcaagcgacggacaactcatagttggttcacctgcgaaaacgaaagaagatgccagcgaaagtgtagctgctattgtattagatactcttatgaaaaaaggacagtcttctgatctgatagacaaacatgataatattccggcccctccaaaaacttgggtacaatctggaagtaaaaaagagtcacctcaaaaaccgaaggacaaagtcaaacctactaacagtgaaacgacggctgtactaaacaattcgtttgtccctctacaggctgtcaaaaatcatattagtaaagttagtagcagtggtaaatctaatgataatagtaaagacttatcaagtacaaatggaaaagatggacgacgggaattgtgtaaaccacaggaaaatcaggaaaaacggaacacatcgagcggtaatcaagaaatgtcaaaaaaggaaaggaaaaccagaatcgctgccaattttgtaattaagaactgaagcaggatttgtaataagagatatatttttacaatttaacaagaattttagtttagatttaagatttctaataagatctttttcatttgtaattgttagtta

SEQ ID NO: 79 - DNA, 2604 bp, Diabrotica virgifera virgifera
tgacagcaattgtcaaatgagcactttaaaataaagtaaggttatattgacgtttttctagcgtttggttttggccttggttcttggtttagtgttttgatcaatcttttaagaactctggggtaatgggaagtgataaaaaacgtcgttctcgaagccgagataaagacaagcgtaaacgttcccgatctagaagcaaagaacgttccgatagagagaaaattcgcgattctgatagacacaaaagacatcgctctcgttcaagagaaaaagattaccccagtagtagcaaacatgataaattcgacaaggaaaaatataaaagcgatagagataaatacgacgacaaggacaagaaatataaagatgccaaaaaagaggaggaagaagaactggagaaggttaaggtagaaaccaaaactgaagttaaacaagaaatataaagatgccaaaaaagaggaggaagaagaactggagaaggttaaggtagaaaccaaaactgaagttaaacaagaaccagcgaagaaggaacctctttcgttggaggaactgctaacaaaaaagaaagcggaagaagcagctaaaagtaaacccgtgtttcttaccaaggaacaaagagctgcagaggcactgaaaagacgccaggaagaaattgctaaagtgaggaaacagcaggacgaggaaaggaaaattgtagaagctgttcaagctggtcgagaagtagaagttaaacgagacgatagggattatagaagaaacagggatagagatagagaggaggagaagcagaaagataaggacaaagagaaggagcaggatgctattaaagagaggtatttagggcttattaagaaaaagaggcgagtgaggcggcttaatgataggaagtttgtgtttgactgggatgctggagaagatacttcgttggattataacaatttgtataaagaaagacatcaggtgcaattctttggcagaggtaatctagcaggaatcgatatcaaagctcaaaagagggatcagagcaagttttatggagaattacttgaaaaaagaagaacagatgcagaaaaggcacaagagaaggtgaggttaaagaaggtgagaagacgagaggagaaacaattgtgggacgacagacattggactgacaaggagttgccggagatgactgagagagattggcggatatttagggaggattataacatcactatcaaaggtggaaaaatacctgaaccaatacgaacctggaaagaatctggcattcaaaaagaacttctagaaattatcgaaaagatcggatacaaggatccaacccctatccaacgtcaagccataccaatcggaatgcaaaacagagacatcatcggtgtagcagaaaccggttctggtaaaacgctggcgttcttaattccgcttctatcgtggattcaaagcttgccaaagctagaacgcaatgaagatgcagatcaaggcccctatgcgattattttggctcctacgagagagttggcacaacaaatcgaagaagaaactgttaagtttggtcaaccgttgggaataagaaccgtggtagtggttggtggtcttagcagagaagaacaaggttttagactacgtcttgggtgtgaaattgtcattgctacaccgggtcgtctcatcgacgtcttagaaaatcggtacttggtcttgaaccaatgtacatacattgtacttgatgaagccgataggatgatagatttgggttttgagcctgacgtgcaaaagatcttggagtacatgcctgtcacaaatttgaagcccgattcagaagaagccgaagacagtcgattgctattggcgaactacaacagtaagaaaaagtacaggcaaactgtcatgtttacagctacgatgcctccagctgtagaaagattggctaggacttatctgcgtcgtccggctgtagtatatatcggttctataggaaaaccggtagaaagagtcgaacagatagtgcatattgtgggcgaaaacgacaagaggaagaaacttatggagtacttatcgagaggttttgaacctccagttatcatcttcgttaaccagaagaagggggcggacgtgctggccaaaggtttggaaaaacttggatacaatgcgtgtactttgcacggtggtaaaggacaagaacagagagagtatgctctggcgagtctcaaagggggatccaaagatattttggttgccactgacgttgctggtagaggtatcgatattaaggacgtttctatggtcattaactatgacatggcgaagactattgaagattacactcaccgtatcggtcgtactggtcgtgccggtaagactggtatcgctgtcagtttctgcaccaatgacgactcagcgctcttctacgatcttaaacagatgttgctatcatcgccagtatcttcgtgtccaccagaattgatgaatcactctgagtgtcaattgaagcccaatcagccgaagaggaggagggatgagatgatttttgcctaaagtcgggcacgggattatttgtagcatttaatttttttgttattaatgtaataatagtgaatatatttgtaaaaa

SEQ ID NO: 80 - DNA, 7613 bp, Diabrotica virgifera virgifera
cttcaagaaatcttgacgctgttgcgcaactttgacaattacatttaaagttaatttttaaaaagatattggtgttgttcctgtttgtaacaaataattgttagtgcaagaatgtgtgatgctattaagtttgtcccagaatcgatcagtatcctagttatatgcaaaaatgtgttttaaaagtcagctggtggccatcttgtttattactggaaatgaaaacatggaaacggacttttttaataaaaattagccgtatgctttgtcaaatattaatgaagaatgcttcattttacttgaaagatatacacaatggctgcaaacgatgggaccagtacagaattgtttcctgggtggtcatcggttgtccaccaacctgctgaagagcctgaagaaagagatttgccaagtacagtggatatcgcagcattaaatgttgagcctagcagtacccaaccaaataatgagaatagtgattcagacagtgactctgaagcagattctagtaattccactgatgcctcgcaaacatgtagccaatcagactcttcagattcagaagacacttctacttcaagtcaaggatcatcttcacgcagtggacacagcagtccaagtccggaattttcagtcaccagttcgcaaacaggtctgtgtttaactattagaaagcagagtcctacaggtgacaaaagtatgaacaaacaaagcgaacaatccaaaacaactagcaaatcaacttcatccagctcagacagtggtccttcaagtgattcggacagtgagtctgaaaagagcgataagaataaaaaggttgaagttaaaaatgaggctaaagttgtatctcctgttaaagataacgttaaaaatgttagggaaactaggaggatgccactgaggactagagcgagagttgctgaaaagaaagaggagaaagttgtgaagaatgtcaagaaggatgttcctgcgtctagtggagtcaaaactagtgcttctaaggtcaaaccgaagcctaaaagaacgaaaaagatggcatcacttcctctttctcgaggatccacctactctagctcagattcggatgattcagatgcggacagcgctatgctggcatcatgtagtctgcaagagatccgtcaagaagatctagctgccattttacctgaccaacaggagattgatgctttcgattttgagtgcaaccgaagtgataagaactctcctacaacaggagacatgtcaggatctgacatggagcttccccaacaagcagtcaacgccttgatccaaaggacaacggagagttccagtgaaggagaatctcatgcgcctcctaatcctaatagtttatatgcgaacagcttgttgcagcaattcgtggcacagacacagatgttaaatgcgccatgtcctacgattccagctgtaaatgaaaatataaaacccgctgtacttcctgcaaccacattggacactcaaagtgctaaacctgatgtggaaaagaaacggcggggcaggccaaagaaagctgaaaaagaagctgtttcttcagaaaaaccgcaggaatattgcaccaacccaaatgtgtccccagattctggcattcaaaatagtccagatcatgtctccagtccagaacctagtctatcacctagtataaagcaaaagtctgctgtgtgtccaaaggaagatacaaaaaaggtggaaaagtccctacccaagatggtaaaaaatgaaaaagctgtgactaaaactaacaataatgtgaaacaagtacctgcgattgttaaatcaaaagaagtaaaggaagtaagtaaaatcccagtaacgtccaatagatttgatagagttatgtatggaaatgcagatagagtattatacccacctagaaggaaagctggaagaccacctgcagttaaaaaaggtcctggaaggccacccaaacaccgaacaactataacaactccagaagcaaccattgtgaaacctgtggaaaaatcaaaagaaaaccaacagaaagttgtcaaaggtagaatgagaatcaggccggtgcttagtacaaagaatagaatcgacaaaagaaaccgatatcagacactcaaggttccaaaacttatgcacagcaaacacaagcataagaaacacaaaaaatacaaatttaaagttttcaaaccaatgtcaacttcagacccaaaaatcaatattgaaattgacaagctcatagcagatttcatcaaatactgcgctatagcgaccaagcaaccaaaggaaaatgtaccggagcaaataattaagactttaaagaaagtaacaaagaaaaggaaaacaacagaagaaaagaagaaaaagaaacagaacgtcagcacaacagataacaaggtacataactcaaatgaacaaagactgcctcttaagaaaagacattatcacatggtgaacaataacgaaaacaaaactgaaactgaagaagtcaaacctgagccagaagaaggcctgaaaaataaagtaaaacaaattattcctacagcaaaagtagaaaaaccgaaaatcggaaatattactccaaaaaatgaaattcagaaatcttcagtatctcctagacatgttccagtaatcaaatctaacatagttgcaattccgaaaatccaaaacatcaataacaatgaatatgaagtgcaagaagctacaaagacggttgtcaaagacactggtaaggtggctgtaaaagaaattactgaaaagaagtcagtcattaaagaaactccaaaaattgtcaaggaaccagtgaaaccagctaaagaacaagtcaagtcagtcaaagaacctgttaaatcaataaaagaatctaaaccggttaaagaaactctcaaaatcattaaagagtcttccaaaccgctcaaggaagctgtaaaaccggtaaaggaagctgctaaaacagtcaaggaacctctcaaatcactgaaggaatctgttaaacctgtcaaagaatctgtaaaacccattaaagaatctgtaaaacccgttaaagaatctgtaaaatctgtgaaagaatccattaagccaaccaaggaacctgtcaaatatgttaaagaaactgtcaaacctgttaaggaatgtactaaaatggtcaaggaaccaatcaaatcgattagagaacctgtcaaacagctcaaggaacctgtcaaatcggtcaaagaacctgtaaaaccaattactaaggagttgtctaaaacagtaaaagagcctactaaggttattccaaaagaaacaacaaaaacagttataaaggattccactaagaaaggtggtggccatattgatggggccatagaagtctgtgttactaaattatcaaaagaaaatgtcccaacgaatgaaccagagaagaaaccttcattaaataacgctatagagaaaaaatctaattctataactactacgccaaagaaaaggcatcgactagaattgacaaatacggttgaaaaagttgaaaaactaacagcgatagtcaaagaagaacctggtatggatattgaagcggagaaaccgaaaatcagtattgaatcgttaataactgagttgaaagttaaaagaaatctcctccagaaatcttccattattgaagacaagaaaccacctgaaaacattgaagaaatcattaaaaaggagcagccagctgatgatcaaagtaccaagttatcaccagagtcagctaaaaagaaggtccgaaaaagaagagctatcaacagaacaggttttccaacagtaaaaaagaggaagaagaaaccatccatcgaatcttcctccactcttccaatggactcccaaatttcaaatgcttgcgatcgggttccaaaagagggggaagagtacacaaagtttgttcagagaacagaaaaatcagagaattcaatatctacaccaggaactccggagaaattaaaaattgatgagtcttccaggtgggaagtgatgagcgaatgtgaaagtttgcccatggatgaaaggactgaattcgatgaagaaatgaaatctgaaaggatgacattacgtcaaagagacctatctccctcatcagtagacaccagaagcagtgaacgcagtaaattcaagctggacgatcccgacgaccttgaactgtctatggattcaggtatagagcgtctaagatccagattggaagatagaacgaagcgaaagagaggcaaggagcaactgtatgaaaacaactatccgaagaggaaattgagagatatgagagatatatctcccgccagtagtatagaacctttcacggaaaggaggctgaaagaggaccgggcgtctacttcgggtgatgagaagagaggcagaaagaacttcaagtggagaaaaaggttccttgtggcggggttgttttcagattactacaaagaagacgatgaaactaaacttcacaaacgtactgaaaatgcaaataaaccaactcgaaatttgacctacaacccgtcagaacatccctatggacttctaccgccaccctaccattgcggtaaatttctgagatgcaggaaaatacccttccagttgccgtatgacatatggtggcaacacactcactcacagttgccaggaaaagattctgtgccttcatggaattacaggaaaataagaacaaacgtctacaacatcaaaaatacgacaggagcatgcgaaccgcaggcctgtaattgtaaaccttccagcaattgtggagatgactgcatcaatcgactggtgtattcggaatgtccggcttcccacagatgtctaaatcagaagatacaaagacacgaaggggctccaggattagaaaaattcatgacagatgcaaaaggttggggtgttaaaacgaagcttcctataaaacagggtgaattcattcttgaatacgtcggagaagtggtggctgatcaagaattcaaagagcgcatgggtacgatatacacaaacgatacacatcactactgtcttcatttagatggtggcttggtgattgacggacatcgcatgggaggtgatggaaggttcgttaatcattcttgtgcccccaattgcgaaatgcaaaagtggtcagtgaatggacagttcagaatggccttgttttcacttagagatattcaggctggagaggagttaacttatgactataacttttctctcttcaatccggctgagggacaagagtgcaaatgcggtagtgacctctgccgaggagtaataggaggcaaaacgcagagggtaagacaacttccagatcagtcgacggtggacagaaagaactccggtagagtgggcagaccgaggaaaacggaagcgaagaagaagtccaacaacaataaggaggtggaaaaacctccgattgctaccccactcctaccaatactgcaagtgaaacctgtgagtcatcaacagaaaatctttatcttggaacatcactgtttcttgttgagaaatttaactaaggtcaggaaagtacgggatagatctctaagtacggcttctgcggtatccaggttgcaaacctcaacccctacagacaccagtacattcatcaatcagctgaacgctcttcagaaaccaagaaacatgaaaactagacgattagcgcaagctgaagacgatccagaacttaacaaaaccgtcaagttagctacattactgaaagatatatggacggctgtaacaaccgccaaagatgacaaaggcagtctgcttagcaccgcattcatgactatgccttcaaaacgcaaagttccagaattctacactcgtctgagcaaccctttggatctgacgacgattgaacagaacgtagccacgggagtctataagaccgcagagagcttcgacgacgatttcaatctactcttccggaattacatcaggttttatggtcgtaccagcgaaatgggaatcggtgctgcaaaattaaagaagatatatacggattccaagagggatagtcttacgaagtttgaggataccttaggagaaaaaccgccgtctgcttttgtttccaacagaaagaaaagtgaagaggaggacatcatcaggtgcatatgcggtatacctcgagatgaaggattgatgattcagtgtgaaaggtgcatggtttggcaacattgtgagtgcgtaaaagctgacgcatctgctgccagctatcattgtgaagtatgcgtaccaaggaaagtggactacgagattcccatgaatgaattcactgaacatgggcacaggtactatatgacactaatgagaggagatcttcaactgagacaaggcgacacagtgtacgtacttcgagacattcctataaaaggaactgataagaaacatacctatgacactataggtaagatcgagtactcagaactggatatatttaggatcgaacggttgtggaaggaagaaaagactggtaaacgactggcgtatggacaccattatttaaggccccatgaaaccttccatgaaccaaccagaaagttcttcccaaatgaggtaatgagagtacctctctatgaagccgtaccagtggagttagttatttccccttgttgggtaatggacataaatacttactgcaagggcaggcctattggtgcggctccagagcacatctatatctgcgaatacagggtggacaaaggagctaaaatattcagcaaggttgccaaaaccaaattttctatatgcacgaaaagctttgcttttgaacacttcgagacgcgtctgaaagttgccaggacttactgtccccatgatgttgatgaggcgttgatgaagtcagtgggaaagaaaaggaacgaagaattaggtggaaaaaataaaatgatagatgcctgtgcaaccgttaaaacggaggcaacggctacttttacagttcttccgcctattgttagaacgccagcggaacagaagacgcgtcttaataaaatactcttgaatctcttaggcaaaatgccaacaaaacaaaccctcgacgtatcttacttactagaaggaggtcgccgtaggaaaaagcagcaaaccgataatgctactagtaaataatagttaatgtctcatcggttattgaaatgggtgatatttttagatattctctatacttaggtcagttggggtcaggaatgaattttcagaacttggtttagatcactttagcctgtagcattaaaatgtttagaaagagggcgcggtcaataaaatgaaccacaacttatattataaaaactaatatatactttctcttggatgcgtcaagcttttgagttcctctgtcaagatttattttagtacttagaagaatagtttgcagtctttcatgtgtctgctgagaaatctatcggtttttatcatttctgctgatttaagttaatttggccagtcaaccttattaaaggccacttcacatgcttacttgtcacatcttccccattttctcttttaacaaatgtaatttctaaaccaggaaggtctttttacagtcctaccatagcttatcttatttcaatgttattagtttcagtagtacatataattattttgcacagtttcattactataccctgttttgaaaccaggaggagtaa

SEQ ID NO: 81 - DNA, 8920 bp, Diabrotica virgifera virgifera
gtcctttagaaagtcactgttcaggtgaaacacagaaattaaagccatccactgcgcatggtacccctttagaacttggttcgttagaaagtcaatgttcaggcaaaacacaaaaactaaagtcttcaactgcgcctggtactccttcagaacatagtctgttagaaagtcaatgttcaggtgaaacacggaaattgaggtcatccactgcgcctagtactccttcagaaccgtcaaaatgttcaaaaacgaatgacgtttttagtaatctaacagtcaatctccagacggatttccaaacaacaaaaactacaccagtttcaaaaatgctatcttcaaccgactttaacaaacaaaaactcaaggttactatcacaaaggaaacttcttctaccgttaataataagccaaaagcggtgcttacaaaaaccactagtgatcctaatatacaagtttctagtaaagagaaaaatgaaaagatgaagtgtgtatcagactcggaagtgtctcgaaacgaggactatgtaaggcaactcaaaataattttacatcccctcagaacgcccatggaatcacctaaagcaaagcaggccaaaagacgtagtactcgattaaatatttcacaagattcaaaaactacaaacgaaaagaaatcagcatcacgagaaatgattttacaacttgtagatgtcatacctgttcctgacaaagaagaatataaatcgccactgttaaaaaatccagcttttgttaagttgttccaaaaagaagaatgtcctctactcgatgtgcttatgaacaaagatccaaagatgaaggtaaaggcaaacagaaaacaagatccgaaaagttgtggtcataaagcaaattctacaacacacaatctcccatcaacatctaaaaatgaggatttaccagtaataagtcaaaattcttgctcaaaattgaaggaaaactatcaacaaacattagaagtgaaagctatcgaccataataagagtaatactgaaccacaatgctcatcatctgatagagaagcatctagaattgaatcagttaaagaggctgatgcatacaagtcgcccacaccgaaatcccctacaaaattttacagcaatttgaaaaaatcgccagaaatgttggagctaaaaagtataattcaaaaaattagtgaaagcgaaggaagacggtgtaaagttaccactaatgaaaaattaagcgagtgtctcaaatctaggcaatataataaaaaaccctcaagctctacatctaatctaacagataatacgagctcaaatccttcgttgaacaaattagaaactccagacaaaatagatcttaattctgaacgtgcttcagcttcttcaactaatcactttttatctccaactgataatctcaggggtagaacacgaaaaatcatagaaatgcttgcagatgatgatcagaaaactgttatcaaccaaaaatatgctagtgaagcaaagcaacgtgaaatcaaaagtgtagtaccagttgaaactacaaataccaataacacaactaccaaaaatgaactacaggaatcctcaaatgatttattaaatattcgacctgtcaaaaatcaaactagttccaagggccctcaaactatcgttgaaagtactaaaaaagtaaacagaagtaacaaattattgcttagtgaaaaagaaattgatagaaacaaagaaaataatagtcgaagctcaagtaatgaagaaaatattccaaatttggagcccaaaagtattccaaaacaatctaaccagaacgttccgacagaaaacttaaaggaacaagataataattgtagtaatagtgccgaacgtaatgttagtttggtatcacatgacattttaatttgtaaagaaactaaaatgtcgtgtgatacaacacaagctaacatagaaactcaaaatggaacaacaaatgtaaattctacaaaggatggtgaagataaagacaaagtatgtactgtaagtttagcaaaagctaaagaaactaatgaagacaatcaaagtgatacactgagtgtagcccaaaataacaacactgtgaaagcacttgatacttcaagaagtacagcaaaagagaatgatttatgtgatcaaaataaatcatctgacaattgtaatgttccaaaagcatttttggaacaagagttaaaagaaaaagaacagaatcatgcagtaggttcaacaaataatttagacgtcagtagagaacaaaaagaaatagaaaaacatattactgttggtgtaagaagcaatttagagtctaacaaaacagatggagataaattagaccttactccagattctaacaacgtactgttgtcaaaaaggagatcattgagatcacaaggagggacatctaagaaacagaaacaggttcagccagaattagaacaggaatctgcagaggttttggaaaatggagcaaatgctcagaagggtgaggcgatgtcaacgtcaggtattacttctgtagaaataagagcagacagatctagcaaatatgcaccacataaacaagttgcaaccgaaatagagattgctccaattttagatgcaaatcagtgtcaaggaatggacgagaatgaagtaaagaaatcaccagatattactccaaaaggaaaagcaggcagacgtagcaaacatacgcctcaaaaacgggaggttacaaacacgacaaagactgaaaatgatgttataaacgccttaacaccgtcttcaattataaacgcaagtcagtgtcagaaagtgtcaccagatactccaagagggacattaagtaaacctaataaacgagatgttacagacacaatagaacatgaatctagttctctaaatgtgttaaaaactcctatggttgcaagtaccaatgcaagccagtgtcgaaaatcagacaagaccgagacattactgtcaccagatattactccaaaaaggaaatcagacagatcaaccaaaactacacctagtagacctgacgtttcagacacaacagagaataaatctggttctcccaatgcgttaaaaacgcttccaatattgaacgcgaatcaatgtcaaaaagtggaaaagaatgagatattactgtcaccagatactactccaaaaagaaaactagacaaaacaagcaaagatatagctcataaacgagaagttacagattcaacagataatggatctgctctgcaggtcatgttaaccaaagatctacctcaagattcggaaaacaatcgttctacacacactaaagaacccatcgattcaggtaagagccaaagtgacacatttgacgttactgaaatgagtgatagctctgatatgttgtcacctcttggtacactaaaaaagaaaagaggtaaaccaaaaaaacattctaccgttaaagaagataactctcaaagtacacttacagaacatatttctctgctaggtaactcccctgtatccaaaagtggacaaaaaatcgtaaatatggatgatggtaccatagaagtaaaaagaaaacgtggaagacctagaaaaacactgacagaagaagaaataaaggaatcagtaattagtaattgtgaagatataagtgtgagtcaaaaattggatggtgataatgaacgtacagtatcaaaatctaccttaaatgaaatacctagtacattacaaatggacaaaattgtagatgacctcaaaattagagttaacggacaaataaagagtaaacacttgctaaaaaccaacaattcaaagtctactttagaaaatagtcaagaaacagaaaatactagtacacaaaatgttcctaccttattcacgggacgaaaagaaatgtcaaaccaatctgaaaacttgctagacgaagaagtctggactataaacaaattgagtagtgaggctaccaaaacttcatcaaacgcagataataaagagcttaaacgggctaaaagtagtcttaacgaaaaactagaacaaaataacgaatttacttctactggaaagctcaaggacctaaataaaataagtaccagggacttattaatcagttcgccacgtaaaaagaggtatagtagaagaaatagtgattttcacgaagagactgaagaaataaatttggatcgaagaagaagaagtaaaagttgcgtaattggcagaatttcggacagtgccaccgacgaagatgattggtgtataaaaaccagaagccgaactagcttaggcgacaaaattctgtgtacaactgacgatgaaggtgaatcagacagtgaaaataacatttccagaagaactagaagcaaaactagtcttggtgaaagaatttcgtcaggtgatgacaaagattctgcgaaagtaagaagcaaatcaagtcttggggaagctcgcagttttgtagagcataacgtcagcgtactgccaagaagaagaacacgaagaagtagttctgttaagcaaagtttacctttagaggaaaaacgacaatctagaagtatgaataacgctaatgcggaagaaaaccgattcaaaagtaataatgatgttaaggacggtgatacgagtgccaattttaatgatagtagtaaggaaaacatcgtcgatggtgctaagagggaaatgagtatgagaaagaagaaggtggcatccacaaatgaatcaagaagtaaagcgtttccttattcaaaaccctcaaaaagcaggagatccttacagctattgaagcgtccgcaacaatacgttaaaagaagacactccttaggatcaaagagcgatattataaggagatttaaggcgatatataaacaagaacacaaaccatttttgcctcagttgggggatttcgtttgggctcagttcagcaattatccgtattggccaagttttgtttcaaaagaaccagactctggattgtttacaaagattgctaagaagggcctcagcgaaagaacagtacatcatgttaacttttttggagataaaggacgaaccgcctggatatacaacagaaggctaatggtatataaaaatagaaacgatttagagaaactgtacaatactttacaagaatttaaagcatttgccgaagttaaagcattttttgtacggtctggtctatcaaaaaaatggacagctgcggtagatgagctagagtatgtcaagacgagcggttttgacttcaaaaaaattactagatttttgacattaaccaatgtttcatcagatgaagaatctaccacagatgaggatatagagaaattggcattaaccagtgtttcatcagatgaagaatctgccacagatgaggatatagagaaattgagtaaggggaaaaagtctctagatacggaaaacgttgatgatcaagaggagatcgttcacgtacagaagaaaattaaacttgaaagtgactcaccgccgactagcaaacagaaattgtctagaaaaaaattggtaaaagattcctcagaaatgtcttcagaagcatcttatccgctgacggagccgaaaaaggaagaaccgaacgatgacgatgaagttaaagacgatagcattgaacacaagattaatcccgacactctacgtcacttcggttcctactccatcgacgaacaaaaagcattatataaaagaaataacctcttcaaaggggtacccaaggaaaaagtatgctattactgtttcgaatcaggtgatctgctcaaatgtaaaggtggctgtaacggactgtaccatcgttactgtgcgagtcaggtactcgtggaaaagtaccctagaagaagaaagtttagaacgtctccagtcaagtcagaaagtatggctaaggtcgaaaatgctaagcctgaagctgtcgaatctcttagcccaactgctacttccccagaagtggtagaagagccggtgaaagctccgccagtaaaaacttccgaaccgcccgaggttgacgacactcacgttcagatagtaacggtaccgtctttccgataccagagcccgcctaaaaagaccttcccgccagattttgtaaatatgtccttggcggatcagatcgattttaaaatgaaggaaattatggggaagttcgagtcgacgacgtatgtagatatattgagtgagtcgtcgagtgacgaaaaagttaccagttctcctgtaacgaaaacgccgcttgagaataatgtaaataaaacttctccatcattaacagctctggttaacaatcagactgaagaatcacaatcgagtaatggacagaatgtaacggaagaatcaatggatgcagacgtcgactataccaaagatcgtgctagcaagcatagagctccaacaaaacatgtaacagcagattgtagaccaataactcatagcaaaaattcttctcaccgtgtaaatggctatagaaaccccttcgcaaaacatgttaccgctgacagtgagataggtctagactcgaaaacattcaagtgcggcttttgcgtagaagacatcgatccttactgctttatttgctacgatacggtatcgaaaaaaggcggtacaacgagacagaaatgttcgttgcatccgtgcccgcgcttctaccatccggattgtttaaagttgtggccacaaacacagtggtcgttgatccagactacgaaaaaccggttttcgcaagaggagcaggatagttttgtgtgtccgcagcatgtctgccacacgtgcgcctcggatgatcctcgtgctgccatttctaggtgtccctgggataaaatcgtcaaatgcctgtgttgtccggctagctaccattcgaccaacttttgtattcccgctggtacggcgattataagtaccacccaaatagtttgtccgaggcacaggtacaggacgaagccgtacaccataaatacgacgtggtgtcttttgtgtaacgagggaggaaacctgatctgctgtgaaacatgcccaaccagtattcatccggaatgtatgacagtaaatttaacagacgacgatagattcatttgcgaagactgcgaatcgggaaggctacctttgtacgacgaagtggtctgggtcaaactgggtaactataaatggtggccgagtctcattatattccccaacgaaatacctcccaaagtgcagagcaccaagcatcatccgggggagtttgtggtgaagtttttcggtacttacgactattattggatgaataggggaagggcgtttttgttccaagagggtgatactatagataatggtataaacaccaagaaaaagttccaggctgcttttacgagagctgtagaggaagctgtggtagctcatcagatgaagaaacaatttaaaatattacaagcggctgaaacggcagtttcgatgaagccccctccgtacataaaaattaaagttagtaaacctgtaggaaatgtcaggttgaccgaattagacctaagtaacactacagcatgtgagtgtgatcctaagcaggtcagtccttgtggacctgatagtaattgcttgaataggttactcctcaccgaatgccaccctgaggtatgtcccgcgggtaaacgctgcaaaaatcaatcgttcgaaaaacgggagtaccctacgttagttccgtacagaacagacatgcgaggttgggggctcaaaacattagaacctatcaaaaagggacagtttgtgatcgagtatgttggagaactgatagatgacgaagagtaccaacgtaggatccaaaagatgcacgagcaaaaggaggagaactactattttcttactatttacaaggatagaatgatcgatgccggacctaaaggtaacatcgctcggttcatgaaccactgctgccaacctaattgtgaaacacaaaaatggaccgtaaacggtaatactcgagttggtttgttcgctacggttgacattcccgccgataccgaattgacgtttaattacaatttagaatgcaccgggactgagaagaaggtctgcaaatgtggagcccccaattgcagtggattcatcggtgttaaggcgaaaaacgattccgccgaactgagaaaaccaaagaaagaaaaaaagaaaaaagagcctgagaaaccaatggaactgccaccctgttacatttgccaaagaaaaggtcgcgttagtctgtgtaataataaaatttgtaacaaggcatatcatttaagatgtttaaaactaaaggaaaggccagacagtaagaaattcgtatgcccgtggcactattgcaacgtttgctcaaaacgaaccatccgatgttgtgttaagtgcttgaattcgttttgtccatcacattcagagggaaacgtccgttacgacaacttgatgggtttcgtgtgccacacgcacgatccgacaaatgcaacatcacaagctgtgaacgttacggtacgaaaaagaagaagcaacaacgtaacagatgaggcgcaggtctcttctacgaccaccgataacgatgacttcgatactgaagcagactcttcaacttgccgtaaatcgaggaaaagtaaaaagaccgtagaagaagatgagaatatagatttcgatattagcgaatcttgtacgtcgagccctctgaaaggcgcagatgatgaatcgcaagatgaaacagtttctagtgcaacagtttccgattttgaagaagaaattcggccgaaaaggaagaaaaaacaaattaaaaagctccgctctaaaaaaaggaaactgaagttctctaataggaaaactataaataggaatacaatcactgccaatagtgtaaatgatacgaccgagtcgaatctgaatgtggatatgtagatatagacctagattttagtagtttttgtaatttcatgaaatatattttggttttctttttaaaaaatgtgactattcacattctgacttttttactttga

SEQ ID NO: 82 - DNA, 3616 bp, Diabrotica virgifera virgifera
  misc_feature (314)..(368): n is a, c, g, or t
  misc_feature (1240)..(1242): n is a, c, g, or t
caaaaatggcggttagctggaaattagaaaatacgaaaacaaaggaagtagttgacattgaaaagtcagtatttaaaataggaagacatcaaggcgcagatttaaaatcagaaagtgttactctttccagggaacatgcagaaattttacaaactgaagatggtttcctatatgtgaaagataatgggaccattaatggtacttacatcaatgagcaaagaataagtccattaaggaacgtccctttaaagcatggagataatattgtgtttggagtattcagcctgatgaaaaaaccaaattttcgaggcccnnnnnnnnnnnnnnnnnnnnnnnnnnnnnnnnnnnnnnnnnnnnnnnnnnnnnnnagagtcagatttttcatatttcggaaagaataaaatctgagccaatattttcagatcaatttcttgatccttacatagatattaaggaagaggtcaaagaaatggactactgcagtcagttctaccaaaaggtagatttaacggagaaagaccattttgacagtacatcggacctccttcagttattggaatctggaacagccaatagtagggaagcggtaacagataaaaatattgagcaaaatatttccgataaatctgatgaaagtattgagcaaaatatttttgataaatgtgagaaggaacttcgtgtcgttttggcaagtcttccagtaccagaggaggaagtaatagatcttgatgttactccaaataaagaacaaacgttaaacgcttcggaatcggtcctgggcgaatatgcacaagtaaacggggacgaacaaaaaaataacaagaaacttcacgttgttttggaaagaggggcgaaagtgaacacggacgaacagaaagctgacaagaaccttcacgttgttttggaaaagattactgcaccgaaacagattaaacctcccttggttgagcctcattttgaagaaagccccagaaatagaagaaagactcttaaaagaaagtctttagatgatagtaaagaggagccattcaaaaaaccaaataataatacatcgttagaaattgccgaaacgtcgatgcgagaaacgaggaaacaaagattgcgtgagattgcagataaggccgagaaaaaaacaccttcaccaaaatccatcaaaggaattgcaaaagtaaaattgtcagaaagcagaggtgcgtttcttatacaacctaatactgtacctgcatcgactaatgtaggnnntgtacctgcatcgactaatgtaggtaaatcttctaaggatcctagactgaataaaccagaatctaaaccagttaataatactactacgcgtaaacctcttgaaacaaaagtcaacaatcgtttgcctccagtaacgcagaatattagtctaccaggaaaagaaaaggttggcttgatctatcaaatttcgaatcgtaatgctgcagtggcaattccaacgaatgtcagaagacactatgacctgagcgatgacattaacgtgatgctttattggaatgtgacctggattttggaacaaagcaaaggaattagaagtccccctgtgactgataacaaacccgcggtaagaataccgtcaacatttcgtaatattcagcattacctagatgtaatgaaaccgtgtattctattagaagcttggcagtatatttttcaaagcacatttagaaatgatgaaggaaagcaaaatataccataccattacgttcgtgtagaacatacaagaaggtgtgagaagacagtgacttttgattgcgtgtcggaaaatacttcctttagacctgacgatttgtgtgtggtaaatttttgtgtatcgatcaatgggtcaaggcactctaaagataattttggatatattacaaatgtacataatagggataaattaatgaagttttctatagtgctaaagccacctagtgggccgttagtaggtaataaacttactgtgaaagtaatagcaaatatcgccaacattttgcgacaatttcgcactctcaggtatttagaacaaagtccattacttaactatatcttggaaccagaaagattatctacgttaatgccaatacacggcagaatcacgagaaaagagttttcgttaaattctatacaacaaaaaacatgcgctgaggcatccgaattggcgttaggtaacagaccaggtatctatttaattcacggcccaccaggtaccggaaagtcgtctgttatagttagtatagtattcgaaatcatattcaaagccatgcaacgcaacgaatctcctaatctactcgtaacagctccttcaaatgctgcgataaatgcattaattgaaaagctctctgaggccaggtccaaattaaacgataatgatagaagacatattaagttgataagggtgggtcccgaaacgagcatgagcgaagtagcaaaaagatattcccttagagagtttacgcgaaaaaatatattgagtagtaataaaaacgcattacaccaaaagtattctcatgttgcccatcaaatagatgtaaatacatttttaaaacaagaattaggtgaccagtatgattatattatcagaaatacagaagaaacattactcagtaatgctaatatcatttgtacgacgcttaatagcagtgtcagctacattctcaccaacagaagatcgaacgtaaaatacactgcttgtattatcgatgaagctactcagtgtactgaaatagaatgtctttttccgattatgctgaacgtagataaattcattctcgttggagatccccaacaattacctgcagttatctgcaataaagaagcccaagatgtcggttttggcaaatctctgtttacaagaatatacgagaattttgtcaacaatcgagacaacagcccgatgaaaatgctgtgtgaacagtaccggatgaacccagccatctgtgattaccccaatagaaaattttatgatggagcactgaaatcttctccaatttgtactaatccaatacagccacatctgaagccttatttagtatttaaccttatgaaccctgcaacctcatataataaaagctctgaatatgaaaactccaatgaattggatgttgtttcttgtatattaaaagcgttgaatacgcatgtagtgtcgacctgtaaatacagtgttggaattattacgccttatcgagcgcaagtggttttaatttcaagatgtataaaggaaatgaagatgaacgataatgtaagcgtcaatgtaaatacggtagattcgttccaaggcacagaagatgacattattattatttcctgcgtgaggtttagccaaaattgctttttagctaatgagcatcgtttgaacgtcgctctcacgcgaggcaagaaagctgtttatgttatagggaatcattctcttttcaagcaatgtcgaccgttatatgatcttagggaaaatgcgaaacaaagaaaagttcttcttgacataccaaacaatccactgtcgataccgtcgttccataaactgatattagatgtacgttaagaataaaaagaaaaataagtttattatgtgccagactaatttttttgtatataatccagtgatgagccaatctaa

SEQ ID NO: 83 - DNA, 948 bp, Diabrotica virgifera virgifera
atgaatatgaacacaaaatagaaaatgtattatattttccaagaagtatcccttctaaagaagcagaaaaattatatccagaagttttaagttgtgattgccgaaatgaatgcagtatacaaaattgtgggtgctttaaaaacagtggaagtgtttacaaatatgaaaatggaaatcaaacctgagttacctttatttgaatgtaatatgaattgttcttgttcaaaagagatttgtggaaacagattagttcagtacggacccagaaaaggtttaatggtaaaaccttgttcaaatactcacaaagggcttggattatttacaacaacgtcaataaatgctgggaattttgtttgcgaatatgctggtgaagttttgacagaaactgaagctaaaactaggttcgaattgtataaagaattatataaaatgaattatatattatgtgttaatgaaatatttgatcgatataaattgaaaacatttattgaccctacaatatatggcaatattggaaggtatataaatcatagttgtaatccaaactgtaaattagttatcgttaaagaaaataacgcaatgccaattatagcaatatttgctaataaaaatctagaaccagagacagagattacgtatgattatggggaagaacaaagagataatagtgaacattgctcaataaaaccatgtttttgtaatgtaatgaaagcaactgtagaaaatatttaccacttgatttaagtttaacttaaccaaaaaagtcaatattcagcccagtgagatgttacactcaagttaaatataatgtaaagttatcctgtagttaagttctaatcttcgaattgctgtgatgtatcataatttttttttgttttgttttctggccttggtttacaacctttagccacaggtatcacaatttaaggggttacataggtcttgcgg

SEQ ID NO: 84 - DNA, 757 bp, Diabrotica virgifera virgifera
gtttgcgaatatgctggtgaagttttgacagaaactgaagctaaaactaggttcgaattgtataaagaattatataaaatgaattatatattatgtgttaatgaaatatttgatcgatataaattgaaaacatttattgaccctacaatatatggcaatattggaaggtatataaatcatagttgtaatccaaactgtaaattagttatcgttaaagaaaataacgcaatgccaattatagcaatatttgctaataaaaatctagaacctatcactgagattacgtatgattatggggaagaacaaagagataatagtgaacattgctcaataaaaccatgtttttgtaatgaaagcaactgtagaaaatatttaccacttgatttaagtttaacttaaccaaaaaagtcaatattcagcccagtgagatgttacactcaagttaaatataatgtaaagttatcctgtagttaagttctaatcttcgaattgctgtgatgtatcataattttttttgttttgttttctggccttggtttagaacctttagccatgcacgtaattacacaataatatggaatatagtgtaagcagcaaataatagaattaggaaaaataatacaccatatgtacagacggttcattcagcttgggagtattttgacagcgtcattgtcagaaatatacgacacaaaaaaatcacatagactatattattatcaaagacagtgtcattcagagcgaagtgacgacacca

SEQ ID NO: 85 - DNA, 283 bp, Diabrotica virgifera virgifera
cccgccgcatcagctcaacaagaagccgcgccgtgttgcgcgcgtcgtccagtccgcagtgcaggcggccctcccagtccagtcccgctgccctgaccgcctcctggagggtgacccgccctccgccgccgagcgccgcctggaaggggaccctcaggttgatccagcgatcgaagtaggagggcttctcgatgcccttgaagcggcactcgaactcgagcatggtgcggcagtcccagtcgccccaggtcacgacggccaagcggacgctcctcttgttccc

SEQ ID NO: 86 - DNA, 1949 bp, Diabrotica virgifera virgifera
cattttcttgcatcatttccaatatcgtttctgatatgtcaaaaaaatgtatagtgtcatacacagatacaagaaacgatatcagaaacgatacaagaatttgtgtcaggcacagattcttgtacaagaactgcgccaatttctgcgcaaagagcaaaaacgtaaaacctgctggtaaaacatctaaatgtcataatggcggctgaaaatgagatcatatgatttatgtctgatgaatttatttgtgttttttataatgaagaatcagctggtcttttttcttcacataatttttattacgacagttacctcaaagacacactctgttaaagatttaaaaaacgtatttaaagatgagctctgcatagaaggtaatattaatagtatatattccaaaaagacggacactgtggttgtgaagagtacaaaaactgaaggtcttctcaaccttacttctgtaggaacagtacaggagtctgaaaagccagtattatccagactgaatgaactagttggcttcaatcaaattgactattatttcaaacttgaaaatgaagagggtcctccacataacaggttgtttacagtagaactaaccttaggcaaagaaaaatatataggaaaaggaaaaagtcttaaaaaagccaaacaagaggctgccacaaaagctttagaaaaaactgaatatgattttcccgaaataaaaaacaatagccctgaggatatagaggaactcactcccactgttcttctaaataatatagcctctaaattgggtgttggagttacatattatcttctagataaaaataaagaggaaatactccattccaacatcattatgactgacaaaaagaaatcatatttgcaaagactgaatgcgtctatttacaatgacaaaaaattaagaaaaaagaaagagatagagtcaaccaagggtccatttaggctgaaattgaaatttgctgattatacattctttacaacttcacattcaatacagggaggaagacatgaagttgctgtacaggctctggaatacttggttaaaaacaaagacagtctagatatcgcttgtttgcaggaaggatctgaagctgaatgcaagcagaataaagattacctgaagtcacctatctccaaagtgtatgaagaagccgaaaaaaggaaaatgagcatagaatgtgaagtcataaaagaatctggaatgtctcacaagaaaaaatttaagactgaatgtagattgggtgatattataacagaaggtgaaggtttttctaaaaaagaatcaaaaagagatgctgctatcaatatgttggcaaaaatagctgaattggagcctcttccaatagaggaagaagctagaaattttataaaaaatgacaagaaacaaaagaataggaggaaaaataaaaagaacaagctgatcaagactaagtttgatgagattgggatgatgcttgacaaagtgggagaatctattaaaactatgactacaaatatttttggagaggaagatcagcctactgattcaaatgattcaagtgaatatgatgcaaaacctaaggaagtaaaatcgaacaagaaaagtcataaacaacagccaagaactaaacaatcatcatttcaagatgaactgttagaattaagcaacatattaggttttggaatatcttatatagatatttctgaaaaagataaacatgcatctctactatctctttataccaatccagaatatatttgttttggtgaaggcaaaactgagtctgatgctagaaatagtgctgctgataacggcttagatttgctggagaaaattggtatttatgatttatttcaagaacagaaggaaaccaatttggagagggaaaccaaagaaggagtaagaattgccatgaagcacatagtttcagaaaagaaagaggaattgtgataaactgcccaga

SEQ ID NO: 87 - DNA, 2695 bp, Diabrotica virgifera virgifera
ctgcgtgtgcttttcgagagtgcggtgttgtgtgtataaggtgtaaaaattggaaaaacgaattaactgtacatatctgttacatttattaatttaggattagatgaaggttaaattatgccacgaaaggacaaattcgaaaacaacggaggttctacaaatcgtcggacacacacctacatgtctgcggaagatcaagcgagcggcaaaaagtcctactggacagaattggagataacagggactattcgaaatctaagctccaatctgttccagttaacgcatctaacggctttgtacataaaaaacaatcagttattgagactgccaccggacatttgtagtttagtgaatttaagacatctcgatgtgagtaataataagttacggtcgttacccgcggagttgggagaactcatacaccttagggagttaaatttatcgaataactctttaagaatactcccgtatgagcttggcaagttattcaatctcctgagtctcaatctaggtgggaatcctcttaacaaggatatccttaccatctataatgaaccaaatgggacagtgaagctgctaacgtttatgctggataatttacaagttactactccttctccacctcctcgaccgtggattcctttggcaaggccatcaacaaatagaccaacatgtatcttcactgtgatgtgttacaatgttctttgtgataaatatgccactaggcaaatgtacagttactgccctagttgggccctcaactgggactataggaaaaaaggtatattagaagaaattaaacattatggagctgatatcatcaatcttcaggaagtggaaatggaacaattctacaattattttctaccagaacttaaggtggacggttatagtggtatctattctccaaaatctagagcaaaacatatggcggaaagcgaaaggaagtatgttgatggatgcgccatcttttttagggattcgaaatttacgttagtaaaggaacatttagttgaatttaaccaattagctatggctagtgcggacggaatggagcacatgttaaatagggtaatgcctaaagataacattggattagcagccctgttacaaacaagggaagcggcgtgggacaacgctccaccagattctcccttttttcaacagcctatcttggtgtgcacagcgcacattcactgggatccagaattctgcgatgtcaaactcattcagacgatgatgctgtctaatgagctgaagacaattttggaggaatctgtgcagaccttgaaggctcacgacatcaacacggactcgagtaacattcagttagtattatgtggagatttcaattcactgccagattctggagtcattgaatttttgggtacggggagagttgcaatggaacacaaagacttcaagacgttcagctacaaggcctgtttagagaaagtactcagctgtgataaaccgaatgagtttacacattcctttaaactggcgtcggcttataatgacgaaataatgccgtttaccaactacacgtttgactttaaaggtattatcgattatatcttctatgccaaacaaacgatgacgccgctgggattgctgggtcctctctctcaagaatggttgcaacagaacaaagtaataggctgtccgcatcctcatatctactcagatcatttcccacttcttgtggagctggaaatggtaccaaccattacatcctcaatgaatggactgattggtcacagttttaatccgtacgaccgaaaaataaataggtattataattatcactatccaaaccagaatccatacgaacactattatcaacattattattattcataacaatgtgataaaaatggttcaagctcagactcgaaccagtgattcgaattcaaaatttatatcaacacatatccaaagatgtcagactgccatctaacaaattcgcagtcaaacaaaagtataagacagaaactttcaaaccatctctgccgtcccaaaaaatcccaagtcctgttgtcgacttggatagtagacataaaagctttacaaacagttcaaagactttttcttgagagtcgccgctgtgagatttgttgtgttttagttcataagtctgagggtttttagtaaaatgactaaaacaattttaggtatatatatttttgtactaatgcggttactgatgcgactgtcagaccaagatcactatcaatatatcaatgtttgtgtattttctcgatttgaaaatactgtgggtctaaattttataattaattatgtattgtatatattcttactatatgtctaagccaattcatttggctgatttggtcgtgtagaaggaccattctctatacatttttcattcatacacaaaacctaagtaaaatatatttaatttactattctaattgggaaataagccacaatttaacttaaaaaatgattttattgacgtttcgacttccacctcggagagaataatatatctaatataaagcttcagaacaatattgaaaggagctattaaccaactaggggcttccataaatggtagaactgtatacaggtaattgctgatatacaaagtgctattaacaaaaagaaggaaaaattaaggaagttggatttgcctctccatccttttattattgtatagaatagaagccag

SEQ ID NO: 88 - DNA, 5983 bp, Diabrotica virgifera virgifera
aaatctggacgagccaatggccacatacgtcagtgtcaactgtcaactatcgatgacctgcctttaaattattatcaaaaaacaaatgagtaatgggaaatggtgcttgctgtcgacaaggcaagtaatttgataaaacacttgatcgatactggaacgaatcgctagcacattaatgataaaatgagtgtggatgcatacggaccgagttcccaaacactcacgtttttggacaccgaagatgcagatttaataggagcggatactcagggctccgaatgtgactttaccgattttacaattccctcgcagacacaggcctcccaacatgaccatgctggccccaaagtgtctggagtacaggtaaataacaacattgtcaacaaaatcacagctaccactaacgctctgggagaattacaattcgaggaagatgatgaagagggatatttcaatactaaagaactgcctgattatgcctgcaagtactgtggcatccatgaaccaaactgtgtcgtcatgtgcaacctctgcaagaagtggttctgcaatggaagaggaaacacttccggaagtcatatcatcaatcatttggtcagagccaaacataaggaagttaccctccacaaagatggaccattaggagaaacaattttggagtgttacagttgtggagttcgtaacgtttttgttttgggtttcataccagctaaggcagattctgtagttgttctactgtgcaggcaaccttgtgctgcgcaaaactcgcttaaggatatgaattgggatcaagaacaatggaaacctttgattgccgaccgttgttttttgacgtggttagtcaagataccttcggaacaagaacaattgcgtgctagacaaatttccgcacaacagatcaataaattagaagaattatggaaggaaaatgtcgatgccactttccaagatctagaaaaacccggtgtagatgaggagccacaacaggtacttctccgttatgaagacggttaccaataccaaaacatctttggtccattagtaaagctagaagccgactacgataagcgcctcaaggaatcccaaactcaagaaaacatcgaagttcgttgggacgtaggcttgaataagaaaactatcgcctatttcaccctcgccaaaaccgatggagatatgaagttgatgcacggagatgaattgagattgagatacgttggagaaatgcacaagacatgggcgggagtcggacatgtcattaaagtacccgataattacggcgaagatataggaattgagttgaaaaacggttctggggctcctgtggattgcggaagtaactttgtagttgatttcatttggaagagtaccagttttgatagaatgcagttggcccttcgtaagttcgccgtcgatgatgcttcagtttccgcttacatataccaccgactgttaggccacgaagtggaagaagttttatttagatgtcatctccctaaacacttttcggcccccaacttacccgatttgaaccgatctcaagtttatgccgtaaaacacgcactacaacgccctctatcgttgatccaaggtccacctggtactggaaagactgtaacatccgccactatcgtttaccaacttgttaagcaaaatggaggaccggttctagtatgtgctcctagcaacaccgctgtcgaccaactcacggaaaaaatccacaaaactaaccttaaagttgtcagattgtgcgcaaagtcgagggaagcaatcgactcgcctgttagctttttagctttacataatcaaattaggaaaatggaaggcaataccgaattacagaagttgcaacaactgaaagacgagacgggtgaattgagttctgtagatgaaaaacggtaccgaatgttgaagaaaatggctgagaaggaactgttagaagctgcagatgttatctgttgcacttgtgtaggtgctggcgatcctagactggtcaggctcaaatttcattctatattgatagatgaaagcatgcaggctaccgaacctgaatgtatggtacccgttgtcctcggtgtcaagcagcttattctcgtaggtgatcactgccaattaggacccgtagtaatgtgcaagaaagctgcgagagctggtctgtcgcagagtttattcgaacgattagtagtactaggtatcagaccgttccgtctagaagtccaatacagaatgcatccagaactgtccagatttccctccaacttcttctacgaaggtagtttacagaatggagttagcgcggaggagaggaaactagcgaaaattgattttccgtggcctattcaagacaggcctatgtttttcttagttacgcaaggtcaggaggaaatcgctgggtctggaacgagttatctgaatagaactgaagcttcgaacgttgagaaaattgcgactagatttttaagatcgggtgtaaaacccgaacaaataggtgtcattaccccgtacgaaggtcaaagggcgtatttagtgcaatacatgcaataccaaggatctcttcatagcaaactttaccaagaaatcgaaattgccagtgtagacgcttttcaaggtcgagagaaggacataattattatgtcctgtgtacgttccaacgaacatcaaggaataggcttcttgaacgatcctcgaaggttaaatgttgctttaactagggctaaatacggaataatcattgtaggaaatcctaaagttttgtccaaacaaccgctatggaatcatctattatccttctacaaggaacagaaagtcttagtcgaaggtccactgaccaatttgaaggaatcgctcattcaatttgccaaacctaagaaattaataaattctgaaaatcctgggtcgcactttatgaccacttctacgtttgatgccagagaagccatggtacccggaagtgtatatgatcgcagtgctaaccaggcaatgaacgggcagttcaattatccaagccacaggggcgtgccgttggacgtttttggtagaactcacgatccaatcagctacatatcacctgaacgtgctcaagccagtatgaacctaccagtaccagttggaatgttcatgaatatggcccatattcctcccagattctacaatcaacaccaacaagcgttacaggctcgacagcagcaaaaccaccgcaacagaaaaccgcctcagagacagaagggcaaaggcggtaatcttagtcaagatcatacccaacctttcagccaaagtctgcaactgacacaaggcatgtcgcaacctggtttgtctcaacctggcttcagtttgagtcaacctggattatcacaagctgaactcagccaagatccatacatggcagaataccaatcgcaaatggacggattattgtcacaagattctacataccagggagataggtcagccttctaccagccaagtgcccagttctcccagccctattgatcgagttcggcagaagatgacaatagaatcgcgggagcggtcttctgaaaatttgcaagtgaatgagatctgatcgtcaaattgtcagtaacgcagcaaaacaaggtcacaagatgtcgacaacggataacataaaacaaacaaattcgacaagaagagagatattacacacacaacaaaaaaaacgtaaaaaaaaatactagagaagcgaacaccggaagtgagacgcgtgttgcgcatttctccatattttgtatatcctccaaatcgaaagggggaacgaggctcttccctgtaggtgacgttttcacaccgctgtgactaagatacatttatttacatcaactgtaacttattttaagcttttattttaaatttaatgttttttattaagtttattttctgttgggcgtttgtacatgggggtttaactgtattatttgggaagagtttggtaacgaaataagtagaaagaagaaaacggttcaatgttttcctaaattggtttagtcctttaacgtttttaagtttttgcctcgagtggttgcaacgtggatcagaatatgaattatcttcattcgagtactacgtattatctgttgttcgagtactacaatatgagaccttactttaaaaacttcaatttaatgaaggcgttgggttgttttggagaagcttttacagcgcaaggggtctcacataccacttttccttcatggaacggttagagaacagttctacaagcgttctaataaaatcttgaacattcaaatattttattgaacatagtcagcgaaataacttttgtatacttcgttttattctaaacaatcgaaatcctttaatttatagaatgaagataactttgctctattttatcatggcatattttacctccctgagctaaaaaggcgtgatgaggtaaatatggaaatacacatactttacttctatgtaaaaaaattaacaatcacaagttcttgatatatttattttcatagacgtgcattcttacagtgtaacttcaatttttaccttttttgctacttacaggaattaatatttgctctatctaaacatcccaacatcagtagcttcccacaataaagcttaggtatagcagtggatggaaagatgttaaaagatagataataaatgattttgagggtatttggttgatagaaaagaggttaagggatgaaaaacttcacaggccaaatagattcgttttcttgggtctagatgaatgtttctaagttataaaacgacttttatgttagaacagcttttaacattcaaccttattctatccaactttgtacctaaaccttcccttggctcttccactggtgtctttaaacattaccctacttaaagattattattaattgatagtacctgaaactcagtacctgctttttaacctcttttagattaatttagtttgtttcctaagtaacctcgacaccttcctgtataagaggaacgtcgattatgtatgtatgcagtttgtttcctatgctgtttctttgtaatatttaaactggttacaagcaaaattccaatctagcgacgaaaaaatctaataactggcgcagagaataggataaatatgtcaacattcgtagcagtgcaaattttaaactcaaattgacatcacgatggcgaagatatccaagaattggcgcagtcgatccaataagtatgataaagttcctaacagtgacgtttaaaaatatatgtgtccaactacgattatgtaaatttcgaagttatggtggcactaaaagccaaaatactgctcgagtacttttaaaacctctattatactgatcaggaaccaaattagtgacttttttcaaacaactataaaaacaaaccacaaatttttatgtattcaatcaatagtgttttttaatatcttttgaaaatagcatatacattgtcagtaatcttccaaaatattacggctaacatcccagcaaaaagtgaaaaagaaactaaagtcgtttcgcttaggtagagacgttatgtcccaatcagtaaaagaatgaatataagtttgtatagctttattttttatttttctatttcggcataattgtcagggttaatggtttaactattgtattactagaatcatatatgttcttgtttaatttcaaaaaaatagtccgattcgagattgaaaaaactcgatttgttcattatcgccgtcactcactgcttttttgttttggacttttcctgcatacaccgagcaatccacgtaaaactggacaagtttcttgtgagtcataaatttatttcaaaataaataaaatgttcaatgtattaaggtttttttatttagttagttccttttattcctatcccatacatgatacttcaccaaatgattgttggtagaaacaatcccccacttatttacaaacagatttcagcgaatgagttgaaaaatattaggagatcttttgacctggagttgagagatctg

SEQ ID NO: 89 - DNA, 1881 bp, Diabrotica virgifera virgifera
gtggcgggatattttgattttgacgacataacacaaaaaactgtctggacttgtgtttttgtttgtatatcttattttttaccagaaaagtactgagctaaaactacttatcaaaaaattacctctccaacgtcttgaccgtgaaatcacacaagattttaaaacggctaatctacattattggcaaacaattaaaaatggttagcgatgggttgcggttgatatttgcagtagaaaatcgtaactatgctgaagttaccagattgctagacaaaggtgtggacgtaaattatatagatccgttaggaaattcaccgttacacacagctgtagatataaaaaattttgaaatagccgaactcttgcttaaaagaaatgccaacgttaacacaaatgtaaatcgatttggtcaatctataccttcgcctctatactgggcagcccggcgtggtcatcttggtgtgttaaaattattaatcgcgtatggtgcatctttagaaactaaatgttcaaacggattactaccaatacacgtagcagcagaaaaaggccattttaaaatagtcaaatattttgtagaaaacaaattgtaccatgttgatatttgtaccaggactcttcgaacgcctttaagttttgctgtcgttgggggtcactcagcaattattaaatatttaattaaatgtaatgccgatgttaccaaagcggatatatctaacagaagttcagcctttcgtcatgcatgtaaggtaactcgtggagatcttattgaggcgttgatcagaaaaggttttaaactcgatggtttctactatggagaaacacctctacatttattcgttaggagtggattacttagcgaagcaaggcgccttatagaaagtggggtaatgtcttatcttgaagcagatgttagcggcaacaccccaatacacgtagcggttcagtataatcaaaaagaaatgctggaatatttcttcaaaatgggaattagtgctgattttcagacagtagatggctactctttgttgcatgacgctgctacatttggccgattacaaatggttaagtttttacttaaaaatggagcaaatatcgagggtaaaattatttctagtggcactactgctttacatttagcttcaagttctaatcactatgaggttataaaagttttattaacgaaaggagctgatgtaatggcaatagataagaagggccgaagaccactggattttgtgtatgaacattttaatgctgatccaaatgaaatgcgaagatacgatatgaaatgtagtgcggagctattagtaaaacacatgttattattttgcaaggatgtagaagtgccaacacctatttatttttcaagtaaaacaagcataaacgaatttaagcagaagtgccaagaagaactcgaacgaatgaaaacctgtttgatagaaaatacctcggtgtccttatatatctttttacaagccttacgtaataaaaataaattattaaattttttacgcaaccacgaattaaaagaagaactgagaaatattaaaaagtatattgacaaatatccgatttactccagccttttgccaatgattttacacggagtacataacggtaaggaaagactactgttactggaaaaagctagtgctgcaatggatatcattgttcaaccttatattggagtgtaaaataaacatcttgcaaatgctaaacaatgaggatctttctagtctaatcgaatcagtaaaagtcgagttttattagtcatcataatcatcataatcaatgacgttacaactcttcgtgtgagtctttgccacgtttactattgccttccattttgtcggtcatgtgccactatttctcaatgtc

SEQ ID NO: 90 - DNA, 6299 bp, Diabrotica virgifera virgifera
gcgagtgaatctgacatctaggccgtcataatattctcgagaacgggctttggaatcggttatgaatttttaccagaaagtagatttgtcgccagaatcagtcagtgatatttaagtccttaaacgaaaagacttcgagtaatgtaataaaagaagtagtttattgttgtgatatacgagtaaaaggttatgaaaaaatgaagaagtgctcttggtgccttttggtcatcgttctcttgacggtttttgaagtgacgtcgtttagagtgcgtcgaaatgcttccgtggtaagcaccactcccacagcagacgaagatgacgaggactgggatgaacccgaatcttcagaaatagacgatgatggaaaggtttataagaatcccagaaattcaccgtctactttatgtccaagagacgaagaacaagctacattacttggtcaaaaatgtttaagaaaatgttcgtccgatgaagactgcaaaagtaagaagaaaaagtgcctttgcgatggatcctgtggattatcttgtataaaaccagatcgtgaatgtcctgagccagaacaaatagcgtacggatcagtagcagccagcggaaaactctttggagctcgagctacatatacttgtcaacatggataccatgtcgttggacttcaaagcagaacttgtcaagctgacggccagtgggctggaagttcaccagcgtgcaagcaaaatatttattgtttgtcacctcctacgattgaccatgctcgtcataatgcacctgccgaacaaacaacttttgacctggattctactctacaatactattgccatactggttacgtgactaatggttttcctagagcaaaatgtttggcaatagatggacaggcttcttggtatggtccggatatagcttgtgaacctagatcatgcggagcaccaaccgatatttcccatggctggcatgctggagaatgttatacatatggttgcagaataacatatcactgcgccgaaggatacgaactagtaggcaagaacgaacgctactgccaagcggacggtacctggaatccgaaggagctccctacgtgtgttctcgttacagcagtccagtgcgctccccctgataatcctagacacggaaaagccattttcacctcctgtagctacaactcagtcgtcagctatgagtgcaagtatgggtataccttggtgggagaaagtaccagaagatgtggagccgacaagaagtggtctggaagtcagccggtttgtaaagaaattaattgcggacaccctggtcgactatggaatggttggcttgaaaacatagaagctggaacaggtctaggagcttctataatattcaggtgccatgacggtatgctacttgaaggaaatacgtctacagtttgtcaaattgatggaaaatggagatatccgttgccaaaatgtttagctccttgcgtagtgccacacgtcacccaaggcagcgttattttagtcggaagaaacgagacagcgatgacttcaacagttgtacaacatggcgaagcattgtcggtagaatgcgacccccactacgagtttttagcaagtctttcacctgttacctgtaacaacggcacttggacatctatgccaaaatgtgatcccgccagatgcaaacgccttcccacctctccacgcaacggaatggtaattgctcccaaaatggaacatggcatgaaagcaagattcaagtgtaaagatggttttgaattaaaaggggaagacctaatggaatgttccttcggaaattggactggagagctgccaaaatgtgaagaagtatactgcccctatcctggaaatgtgcagaatggaaaaattttgttagttggaaacatgggtctgtacgactatcgcccttatgttcggaaagtaacaaacaacaagcaaataatgtacgattgtgacaagggttatgtgttggcagaaggtccacctggagctacatgtattggaggtcattggagcccgagagaattacctaagtgtttattgggtcagcatccaagaatccgttggaatcgaagaaaacgctcagccataatggaaaaatataaaagagccttcattcgcaatcataaattcatatatgcaggtaaccaaaaaagaaatatccataactatcttcaccttgctgaagaagatttgaatctattacgaaataaaagaagtactgtggtgaaaaagtcgctttatcaaagagttgccgaagctctacaattttttaacaatattaggaaaaaacgagcccttaaaggtggaagtggtagcagagctcttggtaccagccaccgaggttctagctccagtttaaacttgagaagaggaaacaaaaagaatccttacgaagacgacgaggacgataaacctggaaatcaggtaatagaaccgaagaaacccaaaccaaagaacaaaggtccttgcgaaccattgtccagcgaaccttacgtcaacatcgaagtcgtaaagaatggaagagaagctaatgtaagttttagcgccggtaccgttgtcaaaatggcctgtggtaaagggtatgggttgaatatgccggaaaataagacagccaaatgcgtacgaggaaaatggaggcccacgcagcctatgtgcttaatattaccgtgtttcgtgcctataaccccatccggtatttataaattatctaaaaacgaccaatcttcgtcgtccaacgttacaatcgattatgatcaaccactgaacgaaacggttgacatagagaacggacaggtcgttgagttctcttgtgaagagggttaccaggtgcaaggtccaagcaatttgaggtgctggcatggagactgggctgtcaccagttttcccgaatgtagcccagccccgtgtcaacttcctaagattccacatggacattattcatcgggatatagagcaggccttacaatagccaatggttccagtgttgcatatcactgtgaaggagatcagggacagccttcaagacatatacaatgtcttctgggcgaactggaaccaaaagtacccagctgtagtccaagttctgttggaggaaagacagagactcaatacctagggggtagtgacatagtcaaaggtggagaaatcacagtaatccaatatggcaattcgggaggcaatgcttgtggaccaccagcaaaggttcgtggctcgttaatttatagaaatggtcaccccatcgtagaagaagacgacagcaattttccagacggcagtgaagttacctttaattgcatagaaagtatcatgggagagaaaactacatggaagattatatgtgaggatggaagctggataggaaggtcgctcaattgtgattcagatgatgttgctggcactcagataataaacaacaacagtacttgcatctttagaaaccaggaacccaacgttatatcattttttaatgatcaacaaattcgggaagaagtggtcgagtttcctgcaggggccattttgattagccggtgtgtggatataggaaaatttgctatgataggtcctaataaacgaagatgtatggggggagaatgggatggagtgaagcccgcctgttttggtcttaaccaagccaacgattattcgatggaaaaaccaccaaccattctgtttaggcaccaattaggacctatagcgcaatcaaatgaaggaaagttgattgtgtatccaggaactattctacatatggagtgtttgtggataaggcgatttggtaatccaaaatggactattagccatgactatcgaaaatacccagagggatggagtacagatccaggacgagatccacaactagaatacagattatctatcttccatgcatccaaagatgactccggtttgtttacgtgtgtcactcctgcccgttacacccactctgtagaaattgaagtaaaagctatccattgcccagttataccccaaagaagaggactgacggttaacacagacagtacgaagatgaacactagacttaagttttcctgcatcaatggaaatgctttgataggagctccagaggtagtctgcttaccttctggaaattggagctcaccattccctatatgtgaaagtattgaatgtggtgaagttggtgtagtgcttagtgaacatttgaaagtgcttgttgtatctagagaagtaggagggagggcaattttcagctgtgagccgagtttcggactcaggggccctgctgagacaatctgccaggctagtggtgattgggcgacaccgtttcccacttgcgaagaggtacattgcgacaatccaaatgcacctgaaaacggttatattcaaggaactggcccttataaagcgggagatgtggtgcagatcaattgtaatccagattatatgatggaagggcaacccattatcgcttgtcaagagaattctagatggtctggaaaaatgccaaaatgtgtgcaagcatgctcctaccctggtactactataagcggcagaatgtcttccgtgaagttcttttacaaaatcggcgaaaacataacgttcacgtgcgaagaggggctccaactaaagggtgcagcaatgctgaaatgtttgaagaacggaaaatggtcaaacacaattccaacttgtctttcagcggatgcctctgagtctcccaagcaagtctcagttttttaaatttggtattctagaagaggaacggaatgatacagattatgatactacgagtataagtgttaaacagatgatatcttctctagaaaggaaaatcaaaaaggtcttaaattgtaaccattagagtatactgtccattagaattgtaggacagggataatacatataaaactatatcagaaaataatattatggggaaacagtggagtttgttatacttttaagatcaccaacggtcagtggtactgtacttatagacgacttaataaaacaaaaagtaaagcaatcaaaaagttatgtcattaacaaataatataaaaatgttttctattaacataaatatataactgaattagaataagtagaatttatttatccaacagaatttagatgtgtggttaacatgtgttctgctcatctcttcactattagaaatgttaatttctttgtttgccattaagtttaatgtttcttacatgaactgcttttgatgaaataaaaactcttgatatcgttttaatatcaatcatgactctatgatgtttgtttacaacaacaagcacctcatttgtttttgtaaaactcttcattcctctggaatttgttctatttccataattacattaaacaagcctatcagccacacttgaatctatctcttctaaagctgtctaattgagacactcctccaatctccagtgatatcgtctggtccaacagctttacctttctttattgtttaacgctctttaataactgtgtcctgccaattctccctgaaagtggatgaggagtcatgcttgctttatttcttagaaatccctatatatcgttgacttcagatcagcgtcccagctgaggattttggtaaacaggactcccagataggtcgctgttgagttgatagagttttttctgccagtatcttggatctgccagtacatttaactttttcgaatgatgttgtgctacgaaaaacactagtctgtattttgttggcaaagaaagaagaaaacataaagtaataaacctgaaaaatacaaaggaattcagggaaacttcagaaagaaaattcgagaggcaaaagagagcttttatgcaagtgttgaagatatatattggaattctgtacttgatataaattgaatcaaaatgctcaaatttcattaatgtcaccaaataccactacatctacttgattgcgtctttaaggtacctacaattattgtcttcctgagagaattatgattgtgattcttttcttcttcgtaagatgtgtatacgtggcatcttcttcgtaagatgtgtatatgtggcatatgttggcgatcatcatagcaatagttatcatatttgcagtagcgcagtaaagctgcacagatgttatgttgaaccaggttgtgaggttctttaaccaggatgttctttttcttcctgtacctcgctttccaaatctttttccttgaggatggcttgttccttcttactcttcgttaattttggtgtggtcttttcatactgaaaatttaaatatattaagtaatggtgtttaaaaaaaagaaagacgttcagacatattttaagtacaacttc

SEQ ID NO: 91 - DNA, 5882 bp, Diabrotica virgifera virgifera
gcgagtgaatctgacatctaggccgtcataatattctcgagaacgggctttggaatcggttatgaatttttaccagaaagtagatttgtcgccagaatcagtcagtgatatttaagtccttaaacgaaaagacttcgagtaatgtaataaaagaagtagtttattgttgtgatatacgagtaaaaggttatgaaaaaatgaagaagtgctcttggtgccttttggtcatcgttctcttgacggtttttgaagtgacgtcgtttagagtgcgtcgaaatgcttccgtggtaagcaccactcccacagcagacgaagatgacgaggactgggatgaacccgaatcttcagaaatagacgatgatggaaaggtttataagaatcccagaaattcaccgtctactttatgtccaagagacgaagaacaagctacattacttggtcaaaaatgtttaagaaaatgttcgtccgatgaagactgcaaaagtaagaagaaaaagtgcctttgcgatggatcctgtggattatcttgtataaaaccagatcgtgaatgtcctgagccagaacaaatagcgtacggatcagtagcagccagcggaaaactctttggagctcgagctacatatacttgtcaacatggataccatgtcgttggacttcaaagcagaacttgtcaagctgacggccagtgggctggaagttcaccagcgtgcaagcaaaatatttattgtttgtcacctcctacgattgaccatgctcgtcataatgcacctgccgaacaaacaacttttgacctggattctactctacaatactattgccatactggttacgtgactaatggttttcctagagcaaaatgtttggcaatagatggacaggcttcttggtatggtccggatatagcttgtgaacctagatcatgcggagcaccaaccgatatttcccatggctggcatgctggagaatgttatacatatggttgcagaataacatatcactgcgccgaaggatacgaactagtaggcaagaacgaacgctactgccaagcggacggtacctggaatccgaaggagctccctacgtgtgttctcgttacagcagtccagtgcgctccccctgataatcctagacacggaaaagccattttcacctcctgtagctacaactcagtcgtcagctatgagtgcaagtatgggtataccttggtgggagaaagtaccagaagatgtggagccgacaagaagtggtctggaagtcagccggtttgtaaagaaattaattgcggacaccctggtcgactatggaatggttggcttgaaaacatagaagctggaacaggtctaggagcttctataatattcaggtgccatgacggtatgctacttgaaggaaatacgtctacagtttgtcaaattgatggaaaatggagatatccgttgccaaaatgtttagctccttgcgtagtgccacacgtcacccaaggcagcgttattttagtcggaagaaacgagacagcgatgacttcaacagttgtacaacatggcgaagcattgtcggtagaatgcgacccccactacgagtttttagcaagtctttcacctgttacctgtaacaacggcacttggacatctatgccaaaatgtgatcccgccagatgcaaacgccttcccacctctccacgcaacggaatggtaattgctcccaaaatggaacatggcatgaaagcaagattcaagtgtaaagatggttttgaattaaaaggggaagacctaatggaatgttccttcggaaattggactggagagctgccaaaatgtgaagaagtatactgcccctatcctggaaatgtgcagaatggaaaaattttgttagttggaaacatgggtctgtacgactatcgcccttatgttcggaaagtaacaaacaacaagcaaataatgtacgattgtgacaagggttatgtgttggcagaaggtccacctggagctacatgtattggaggtcattggagcccgagagaattacctaagtgtttattgggtcagcatccaagaatccgttggaatcgaagaaaacgctcagccataatggaaaaatataaaagagccttcattcgcaatcataaattcatatatgcaggtaaccaaaaaagaaatatccataactatcttcaccttgctgaagaagatttgaatctattacgaaataaaagaagtactgtggtgaaaaagtcgctttatcaaagagttgccgaagctctacaattttttaacaatattaggaaaaaacgagcccttaaaggtggaagtggtagcagagctcttggtaccagccaccgaggttctagctccagtttaaacttgagaagaggaaacaaaaagaatccttacgaagacgacgaggacgataaacctggaaatcaggtaatagaaccgaagaaacccaaaccaaagaacaaaggtccttgcgaaccattgtccagcgaaccttacgtcaacatcgaagtcgtaaagaatggaagagaagctaatgtaagttttagcgccggtaccgttgtcaaaatggcctgtggtaaagggtatgggttgaatatgccggaaaataagacagccaaatgcgtacgaggaaaatggaggcccacgcagcctatgtgcttaatatccccgtgtcaacttcctaagattccacatggacattattcatcgggatatagagcaggccttacaatagccaatggttccagtgttgcatatcactgtgaaggagatcagggacagccttcaagacatatacaatgtcttctgggcgaactggaaccaaaagtacttagctgtagtccaagttctgttggaggaaagacagagactcaatacctagggggtagtgacatagtcaaaggtggagaaatcacagtaatccaatatggcaattcgggaggcaatgcttgtggaccaccagcaaaggttcgtggctcgttaatttatagaaatggtcaccccatcgtagaagaagacgacagcaattttccagacggcagtgaagttacctttaattgcatagaaagtatcatgggagagaaaactacatggaagattatatgtgaggatggaagctggataggaaggtcgctcaattgtgattcagatgatgttgctggcactcagataataaacaacaacagtacttgcatctttagaaaccaggaacccaacgttatatcattttttaatgatcaacaaattcgggaagaagtggtcgagtttcctgcaggggccattttgattagccggtgtgtggatataggaaaatttgctatgataggtcctaataaacgaagatgtatggggggagaatgggatggagtgaagcccgcctgttttggtcttaaccaagccaacgattattcgatggaaaaaccaccaaccattctgtttaggcaccaattaggacctatagcgcaatcaaatgaaggaaagttgattgtgtatccaggaactattctacatatggagtgtttgtggataaggcgatttggtaatccaaaatggactattagccatgactatcgaaaatacccagagggatggagtacagatccaggacgagatccacaactagaatacagattatctatcttccatgcatccaaagatgactccggtttgtttacgtgtgtcactcctgcccgttacacccactctgtagaaattgaagtaaaagctatccattgcccagttataccccaaagaagaggactgacggttaacacagacagtacgaagatgaacactagacttaagttttcctgcatcaatggaaatgctttgataggagctccagaggtagtctgcttaccttctggaaattggagctcaccattccctatatgtgaaaaggtacattgcgacaatccaaatgcacctgaaaacggttatattcaaggaactggcccttataaagcgggagatgtggtgcagatcaattgtaatccagattatatgatggaagggcaacccattatcgcttgtcaagagaattctagatggtctggaaaaatgccaaaatgtgtgcaagcatgctcctaccctggtactactataagcggcagaatgtcttccgtgaagttcttttacaaaatcggcgaaaacataacgttcacgtgcgaagaggggctccaactaaagggtgcagcaatgctgaaatgtttgaagaacggaaaatggtcaaacacaattccaacttgtctttcagcggatgcctctgagtctcccaagcaagtctcagttttttaaatttggtattctagaagaggaacggaatgatacagattatgatactacgagtataagtgttaaacagatgatatcttctctagaaaggaaaatcaaaaaggtcttaaattgtaaccattagagtatactgtccattagaattgtaggacagggataatacatataaaactatatcagaaaataatattatggggaaacagtggagtttgttatacttttaagatcaccaacggtcagtggtactgtacttatagacgacttaataaaacaaaaagtaaagcaatcaaaaagttatgtcattaacaaataatataaaaatgttttctattaacataaatatataactgaattagaataagtagaatttatttatccaacagaatttagatgtgtggttaacatgtgttctgctcatctcttcactattagaaatgttaatttctttgtttgccattaagtttaatgtttcttacatgaactgcttttgatgaaataaaaactcttgatatcgttttaatatcaatcatgactctatgatgtttgtttacaacaacaagcacctcatttgtttttgtaaaactcttcattcctctggaatttgttctatttccataattacattaaacaagcctatcagccacacttgaatctatctcttctaaagctgtctaattgagacactcctccaatctccagtgatatcgtctggtccaacagctttacctttctttattgtttaacgctctttaataactgtgtcctgccaattctccctgaaagtggatgaggagtcatgcttgctttatttcttagaaatccctatatatcgttgacttcagatcagcgtcccagctgaggattttggtaaacaggactcccagataggtcgctgttgagttgatagagttttttctgccagtatcttggatctgccagtacatttaactttttcgaatgatgttgtgctacgaaaaacactagtctgtattttgttggcaaagaaagaagaaaacataaagtaataaacctgaaaaatacaaaggaattcagggaaacttcagaaagaaaattcgagaggcaaaagagagcttttatgcaagtgttgaagatatatattggaattctgtacttgatataaattgaatcaaaatgctcaaatttcattaatgtcaccaaataccactacatctacttgattgcgtctttaaggtacctacaattattgtcttcctgagagaattatgattgtgattcttttcttcttcgtaagatgtgtatacgtggcatcttcttcgtaagatgtgtatatgtggcatatgttggcgatcatcatagcaatagttatcatatttgcagtagcgcagtaaagctgcacagatgttatgttgaaccaggttgtgaggttctttaaccaggatgttctttttcttcctgtacctcgctttccaaatctttttccttgaggatggcttgttccttcttactcttcgttaattttggtgtggtcttttcatactgaaaatttaaatatattaagtaatggtgtttaaaaaaaagaaagacgttcagacatattttaagtacaacttc

SEQ ID NO: 92 - DNA, 5861 bp, Diabrotica virgifera virgifera
gcgagtgaatctgacatctaggccgtcataatattctcgagaacgggctttggaatcggttatgaatttttaccagaaagtagatttgtcgccagaatcagtcagtgatatttaagtccttaaacgaaaagacttcgagtaatgtaataaaagaagtagtttattgttgtgatatacgagtaaaaggttatgaaaaaatgaagaagtgctcttggtgccttttggtcatcgttctcttgacggtttttgaagtgacgtcgtttagagtgcgtcgaaatgcttccgtggtaagcaccactcccacagcagacgaagatgacgaggactgggatgaacccgaatcttcagaaatagacgatgatggaaaggtttataagaatcccagaaattcaccgtctactttatgtccaagagacgaagaacaagctacattacttggtcaaaaatgtttaagaaaatgttcgtccgatgaagactgcaaaagtaagaagaaaaagtgcctttgcgatggatcctgtggattatcttgtataaaaccagatcgtgaatgtcctgagccagaacaaatagcgtacggatcagtagcagccagcggaaaactctttggagctcgagctacatatacttgtcaacatggataccatgtcgttggacttcaaagcagaacttgtcaagctgacggccagtgggctggaagttcaccagcgtgcaagcaaaatatttattgtttgtcacctcctacgattgaccatgctcgtcataatgcacctgccgaacaaacaacttttgacctggattctactctacaatactattgccatactggttacgtgactaatggttttcctagagcaaaatgtttggcaatagatggacaggcttcttggtatggtccggatatagcttgtgaacctagatcatgcggagcaccaaccgatatttcccatggctggcatgctggagaatgttatacatatggttgcagaataacatatcactgcgccgaaggatacgaactagtaggcaagaacgaacgctactgccaagcggacggtacctggaatccgaaggagctccctacgtgtgttctcgttacagcagtccagtgcgctccccctgataatcctagacacggaaaagccattttcacctcctgtagctacaactcagtcgtcagctatgagtgcaagtatgggtataccttggtgggagaaagtaccagaagatgtggagccgacaagaagtggtctggaagtcagccggtttgtaaagaaattaattgcggacaccctggtcgactatggaatggttggcttgaaaacatagaagctggaacaggtctaggagcttctataatattcaggtgccatgacggtatgctacttgaaggaaatacgtctacagtttgtcaaattgatggaaaatggagatatccgttgccaaaatgtttagctccttgcgtagtgccacacgtcacccaaggcagcgttattttagtcggaagaaacgagacagcgatgacttcaacagttgtacaacatggcgaagcattgtcggtagaatgcgacccccactacgagtttttagcaagtctttcacctgttacctgtaacaacggcacttggacatctatgccaaaatgtgatcccgccagatgcaaacgccttcccacctctccacgcaacggaatggtaattgctcccaaaatggaacatggcatgaaagcaagattcaagtgtaaagatggttttgaattaaaaggggaagacctaatggaatgttccttcggaaattggactggagagctgccaaaatgtgaagaagtatactgcccctatcctggaaatgtgcagaatggaaaaattttgttagttggaaacatgggtctgtacgactatcgcccttatgttcggaaagtaacaaacaacaagcaaataatgtacgattgtgacaagggttatgtgttggcagaaggtccacctggagctacatgtattggaggtcattggagcccgagagaattacctaagtgtttattgggtcagcatccaagaatccgttggaatcgaagaaaacgctcagccataatggaaaaatataaaagagccttcattcgcaatcataaattcatatatgcaggtaaccaaaaaagaaatatccataactatcttcaccttgctgaagaagatttgaatctattacgaaataaaagaagtactgtggtgaaaaagtcgctttatcaaagagttgccgaagctctacaattttttaacaatattaggaaaaaacgagcccttaaaggtggaagtggtagcagagctcttggtaccagccaccgaggttctagctccagtttaaacttgagaagaggaaacaaaaagaatccttacgaagacgacgaggacgataaacctggaaatcaggtaatagaaccgaagaaacccaaaccaaagaacaaaggtccttgcgaaccattgtccagcgaaccttacgtcaacatcgaagtcgtaaagaatggaagagaagctaatgtaagttttagcgccggtaccgttgtcaaaatggcctgtggtaaagggtatgggttgaatatgccggaaaataagacagccaaatgcgtacgaggaaaatggaggcccacgcagcctatgtgcttaatatccccgtgtcaacttcctaagattccacatggacattattcatcgggatatagagcaggccttacaatagccaatggttccagtgttgcatatcactgtgaaggagatcagggacagccttcaagacatatacaatgtcttctgggcgaactggaaccaaaagtacccagctgtagtccaagttctgttggaggaaagacagagactcaatacctagggggtagtgacatagtcaaaggtggagaaatcacagtaatccaatatggcaattcgggaggcaatgcttgtggaccaccagcaaaggttcgtggctcgttaatttatagaaatggtcaccccatcgtagaagaagacgacagcaattttccagacggcagtgaagttacctttaattgcatagaaagtatcatgggagagaaaactacatggaagattatatgtgaggatggaagctggataggaaggtcgctcaattgtgattcagatgatgttgctggcactcagataataaacaacaacagtacttgcatctttagaaaccaggaacccaacgttatatcattttttaatgatcaacaaattcgggaagaagtggtcgagtttcctgcaggggccattttgattagccggtgtgtggatataggaaaatttgctatgataggtcctaataaacgaagatgtatggggggagaatgggatggagtgaagcccgcctgttttggtcttaaccaagccaacgattattcgatggaaaaaccaccaaccattctgtttaggcaccaattaggacctatagcgcaatcaaatgaaggaaagttgattgtgtatccaggaactattctacatatggagtgtttgtggataaggcgatttggtaatccaaaatggactattagccatgactatcgaaaatacccagagggatggagtacagatccaggacgagatccacaactagaatacagattatctatcttccatgcatccaaagatgactccggtttgtttacgtgtgtcactcctgcccgttacacccactctgtagaaattgaagtaaaagctatccattgcccagttataccccaaagaagaggactgacggttaacacagacagtacgaagatgaacactagacttaagttttcctgcatcaatggaaatgctttgataggagctccagaggtagtctgcttaccttctggaaattggagctcaccattccctatatgtgaaagtattgaatgtggtgaagttggtgtagtgcttagtgaacatttgaaagtgcttgttgtatctagagaagtaggagggagggcaattttcagctgtgagccgagtttcggactcaggggccctgctgagacaatctgccaggctagtggtgattgggcgacaccgtttcccacttgcgaagaggtacattgcgacaatccaaatgcacctgaaaacggttatattcaaggaactggcccttataaagcgggagatgtggtgcagatcaattgtaatccagattatatgatggaagggcaacccattatcgcttgtcaagagaattctagatggtctggaaaaatgccaaaatgtgtgcaagcatgctcctaccctggtactactataagcggcagaatgtcttccgtgaagttcttttacaaaatcggcgaaaacataacgttcacgtgcgaagaggggctccaactaaagggtgcagcaatgctgaaatgtttgaagaacggaaaatggtcaaacacaattccaacttgtctttcagcggatgcctctgagtctcccaagcaagtctcagttttttaaatttggtattctagaagaggaacggaatgatacagattatgatactacgagtataagtgttaaacagatgatatcttctctagaaaggaaaatcaaaaaggtcttaaattgtaaccattagagtatactgtccattagaattgtaggacagggataatacatataaaactatatcagaaaataatattatggggaaacagtggagtttgttatacttttaagatcaccaacggtcagtggtactgtacttatagacgacttaataaaacaaaaagtaaagcaatcaaaaagttatgtcattaacaaataatataaaaatgttttctattaacataaatatataactgaattagaataagtagaatttatttatccaacagaatttagatgtgtggttaacatgtgttctgctcatctcttcactattagaaatgttaatttctttgtttgccattaagtttaatgtttcttacatgaactgcttttgatgaaataaaaactcttgatatcgttttaatatcaatcatgactctatgatgtttgtttacaacaacaagcacctcatttgtttttgtaaaactcttcattcctctggaatttgttctatttccataattacattaaacaagcctatcagccacacttgaatctatctcttctaaagctgtctaattgagacactcctccaatctccagtgatatcgtctggtccaacagctttacctttctttattgtttaacgctctttaataactgtgtcctgccaattctccctgaaagtggatgaggagtcatgcttgctttatttcttagaaatccctatatatcgttgacttcagatcagcgtcccagctgaggattttggtaaacaggactcccagataggtcgctgttgagttgatagagttttttctgccagtatcttggatctgccagtacatttaactttttcgaatgatgttgtgctacgaaaaacactagtctgtattttgttggcaaagaaagaagaaaacataaagtaataaacctgaaaaatacaaaggaattcagggaaacttcagaaagaaaattcgagaggcaaaagagagcttttatgcaagtgttgaagatatatattggaattctgtacttgatataaattgaatcaaaatgctcaaatttcattaatgtcaccaaataccactacatctacttgattgcgtctttaaggtacctacaattattgtcttcctgagagaattatgattgtgattcttttcttcttcgtaagatgtgtatacgtggcatcttcttcgtaagatgtgtatatgtggcatatgttggcgatcatcatagcaatagttatcatatttgcagtagcgcagtaaagctgcacagatgttatgttga

SEQ ID NO: 93 - DNA, 11240 bp, Diabrotica virgifera virgifera
gttttttaatataggattaacatgtggtctgtgtgaggtaaaaatgggtgtttgtaaggtgtatatactacttatagtttatattaattatgcgaattcattggaaagctatagcaacaggccacgcatcaaagttaccgatggagatcttcaaattattgctccttcaggaaagaacgttgaatttgttgtaaaaggagaagacgctatggtctccataaaccaaataaatgtgttaaaaacactaactcaggctcaaagtgcaataaaactaacagcatcgtaccaacacaccctgacgtcatacagtgaccgactggaagcactggaaaccaaatcttttgagaatcctatcgtggaaggcaatttcacaaatgccacgcaagggatatccagaatgtctttcagaaaactcagtaggagagtcgatttgcttcagaaaagaatcactgccatgctggtcatcctaacaagagatgactgcgctagcaatccttgtaaaaatggaggcacttgtcaggatttgtttggcagttatttttgccagtgtcccccgcagtgggaaggttctgattgtactgttgatgtgaacgaatgtaacagatttcaaggtactgatttgggttgtcaaaatggtgccgtctgtgtaaatacacctggttcttacagatgtgattgtgtgaacggatatattggtctacactgtttaagaaaaagtgttgactgcgctacagctggagcagaactttgtggacatggaacctgtatatcacaaaataaccaaaacggctacaaatgtttatgtgatccgggttggacaacagacggcaaaactgcagcttgtaatgtagatgtcaatgaatgttcacaaaaccatccaccatgtgcacccaatgttgaatgcgttaacgtcccaggatcattttactgcggtcattgtcctccaggttttactggaaacggctatcactgtacagacatagatgaatgtgtaactaacaatggaggttgtagcatgaatccacttgtgttatgtctaaacactcatggatccagaagttgtggaccttgtccttcaggatatttaggaaacggtatgtcttgtacctatcaaggtgtatgtaatatcaacaatggaggttgtcatcaattggctacttgttctgatagttctaatttaggcacagtgcagtgtgtttgtccattgggatacgctggcaccggcactggtccaaccggttgtgttcgtacaaatactcctctacatgcctgccaaccaaacccatgcgttcatggacgctgtaccattgctgatgatggaaactaccactgcaattgttacaggttttacacaggcgccacttgcgacactttgaaatcagacgcttgtacaccgaatccatgtaaaaataacggcgaatgtcaaagcgttaataatagactaaaatgtgtttgtaagtctggatttactggagcattctgtcaaacacaattgcaagggtgtggcggttatttaagaggcgataatggtaccttaaaattcccagctggagattttgctacgtataatcatcgttctagctgcgcatggaaaatcacgttaaattcaacaaataaggttatcaaactaaacttcactaagttcgatctagaagattcacccaattgtggaaatgactggttggagattcacgatggcccaaatacggtagctcacattttgggtagattctgcggaaacaaattacctttgaatggaaccttgacgtcaacacacgatacactgtatttgtggtttagatctgatgtaacagttgctaaagatggattccaacttacttggacagcagcaaatccaaaatgcgatgaagtaattatgcaacaacaacacggatctattcaatcacctggttctcctggaaattatccattaaatcgggactgtcattggacaatgttagcaaaatacgacaaacgttttctgttccacttcttttcattaaatataggcgacaatagcgattgtagtgctgattatttggaattcttcccaaagttattaccctcaccaggagatcaaactttcgctaaattctgtaacagttccagtcccgaaccattttattctccaggaaatagagttaacatacatttccactcagatggtaaagataactatcccggttttcagataacttattcaattgtagaaggggtaccaggttgtggaggtgtacatactgccgcagaaggcgtaattacttcatcacatgcagacactggtgacctaagcgtttgccaatacaaaattcaaggaggttctgatactaaaatcaaaataaactttatgcgtttcgacttaccagcagggtgcagttttaattatttagagttgcacgatggagcagacgataatgcaccttctctcggaagattttgtggaaataatttacctcatgcatttatttcacaaggtaatcaattgacaattgtgtcatcgtcaactggtggtgaaaacaaaggatggacaattgaatacgtttctgtttgtagcaaagtcctcacagacgaaactggatctttgaacgtacttccaaatagttatgacatatttgattgtatttatcagatccaaagacctcctggcaacgttataatactttttatgaaggttaatttaccatcacgtatattcataagagactcagtctcgcggtactccaagtttgttgaggtacgagatggtgacaatgacaattcaactctaattggcaaatactccggtattacaaatgtaaatctcacttcaacacacaattttctctggataagagtacggaattatagaagattcaacgataggaataatcaagtttctatacaatatacctcaatggatgttggttgcggcggcattctgcgaaaaaaatttggcaacatcgcttctccttcacattcagatggctactatcccccatcattaaactgcaaatggaccattatagctcctccaatgttcgttattcagctcacatggatgacgtttaatatagagtccagttatgaatgtgcgtacgattatgtgcaagtatttgataacaatactgatttaggacaaggggaacagatgggaaaattctgtggattttctctaccacccatgctgctcagctcctccaatatcatgtccatatttttcaccactgatgtcacagttagcatggacggatttctggcatcgtatatattcatacatgaaaaaaacgtttgcggtggaaactacttcactacatctggagtcattagatcacctaaatatcctgagccatatccaacaaacagagaatgtacttggaccatcaatataccgcccggtcaacaaatattgctgaatattactgacttcaatattgaatattattcaagttgtcgatatgattggctggaaataagaaatggtggcacttcagcttctccattgatcggcaaattttgcggaactacaatccctaaacagatagtttcacatgcaaataagttatatctatttttcaagtcagatctaagcagggtcggtcatgggtttagaatttcatggagctccacagcaacaggatgtggaggattgctaacgtcacctacaggatccttgatatcaccacattatcctgagccgtatgctaggaataccgagtgtatttggaaaatcgttactagtgctggctctcgtatacaagctgtcttctctgatattaacctagaaaaacacatgcagtgtttagctgactatgtacagttatttgatggactgacattgaatacaccctcccttggcaaattttgttatgaagctcctgaaccaatcaaatcatcaagcaaccagatgttagttaaatttagatcagatgtagcttttcagggaagaggatttcagcttcactatacaacagtgtgccacaatactgttaaaggatttaggggaatcatcgaaagccccaacttccccaacaactttccccaagatcaagactgtttatgggaaattcaagtttccgataaaaacaaaatcaatatcacgttttctcactttgaacttgaaaggtctctctcgaatcctagtgcaaatagtagttgtctatacgactttgttgagataagttacgctgaaatgaatgatgatttcgaagaaaagacagattatacctcttatggtaaatattgtggatcccaaaatcctggccacctgagtcttaactcagatcatgtgcaagttagattcgttagtgacaagttactattaggaactggatttaggctagaatgggaaatatttggttgtggtggaatattgaaaaagaattctggtacgataacttcaccaaattatccgtatagttacccccctagcgtgatatgtgaatggagaatcgaagttgatttcggacaaagtatagagatagagttccatgaaattgatgttgagaaagatacttcctgtgactttgattcagtatcggtatataatggaatagatgatacttacaacctgttagcaacgatttgtagacagaagaggacttccattatatccagtacaggaaattatatgtttgtcaaattcaagtctgactatagttatcatggaaaaggatttacagcaaattatacaacagtaccaacaaaatgtggtggaagattcacagccagcgaaggttatctatattcacctaattacccaaagaactacaataaaaatgaaacctgcgaatactttattgatatagacgaagggcatgtcattgagtttgtatttgaagatgtagatctattcaaatcggataattgttcgaaaaactacgtaaagattcacgatggaccttccgcagcatatcctgtcttacaaacagcatgtggtagtgacacgccaaatggcactattacatcatcttacaataatgtttttattgaatttaggtctcattccttcttcacaactaaaggatttaagcttaaatactacaaatcttgtgggtctaaaattacaacatcaggaaatggaatcattggtgttcatcatgatgaattttccgacaacacccagacctgcacgtggaccattatatcttcagatccatcaaagcacatccacttaactgttacgcaactccaaggagtctactactgtgttcctgaggatgctccattagaagtgcgcaatggacaaaccacggattctccgttgcttggacaatactgtgggcctaaaataccacccaagatgacaagtgatggatctgcacttaccatacacatcaaatctcagttaactttctttgcaacttatagtgtctatgattcacattgtggaggtactttggaagcagttgaagggtacttctcgactccagagtatcccaaaaagtatccgtccgatataaagtgtgaatggacccttaaaatagccgaaggtaatcacgtgaccttaaacttcatggactttagtttattatcttcggaaaattgtaacaccgattttcttgaaatacgctcccgaaatgcttctggaaaactattggggctttattgtggaacaaacacaccaagtaatattacaaacgttggcagtctctggttacttttccaaagtagtaaaatagcaccaggagacaacaccgtgacggcgaaaggattctatgcacaatacgtattaaatgaagaaaatgaactgagtggtacaaaggggcaaatcgaatctccactatatccattacttgtcatggattataaaacatatacatggaaaattactgtagcttcgaagaaacgaattaggctgtcatttaaagagttttatttggatgccaaagacacatttgatgacgaatgttattttgcaacatttgaagtatttgatggcatggatgatacagccacgtcattagcaaaactctgtggtatatcgctaccagacccgataactacgacttcaaatgttatgtttataaaagtagattacagcagtccacgaatgggctcgaagtttagagtagattgggaacagattgatgctgctgcaagtgtttatacaccttcatacaagacggagtgcaacaatacagaccaggttattcaaataaccaacggaaccagctatattctaagttctcccggctacccacacggctacgaccatatgctaaaatgtagctgggtcttctccacaatacctatgaaccatctttccgtttacttcatggatatagatctagcgatgagcagaagcagatttgcgacctatagaaagtgtgatactttgaatgacaatatcaacatttaccagaaacacttttatgacaatgactggacaaaggttcaatctatatgtaagatggatgatgctaagaaccgtattcaagctacagatttcttgaaagttgaatttgttacaacacgatacataaatggaaccggatttagggctagaattgttgagacctgtgggggtgaattaaggactccaacagggtatattatatacggtaattcatcagttaagggttcggagtgccaatggaacataacagtcggatccacgaagatgatcgagttaatattcgaagaaatgcatatcgatcatgataccagtaaaggttgtgataatttcctaatgttaagaaatggcaaatttgcagactcacctttattaggtgttggtaaatattgtggacatacactacctgaaaagttgacatctactggaaataacttgtatatcaaatataaaggatcaatgagtatagagggctttagactaaaataccaagaagtttcagctaaatgtggtggcaacatcatattgagttcatacgataattttacagaaatcagtagtcccaactatcctaatattcccaatcctcatatagagtgcaactggaggatcacagccccattgggagaaattttaaggatcgattttgaagatagatttgatttaactaataaacccaattgtgacgtggaatacgttgaaattagagacggaggaaccgaacattcttcaagcatcggaaagttctgccgaacttctcccagttcggtatacaccactgataacatgatgttcataaaattcttcaccgatacagatgagcctaaaaatggatttaaagcaaaaatatcgatgtctcgatgtggtggtaccgtgaggggcagaacgggagaattaagttatactggtacatcggcaatgaacaacaataactgcacctggcatattgttggacctgaggatcatttccttattattagtttaaaaacgctagacacaacatgtggatctacagccaattatgttactgtatatgaggatttcccaatgacagaaattcaaagcaagaatggaatgattctgacgcagaattgtggaaagaatgtaccttctccaaccaaaactgaatctaattcagtaagaatagtgatgacgcgtggaaatgttggacacttctcccttaaatacaattctagtcaaactgagtgtggtgggaagttaaataccgaaagtggagtaatagaatctcccggatatccgtccatgcaccacttgcacagagtttgtcattgggagatcgtagtacccgaaggaaggagaattacattcaagttaatagatctcgatttgggaggatcttcaaacaacatgtatgatagaggtcttgagctattcgacgatactactctgaaagtacgacgagcgttgatcactaccacttccaacgaaacttcatttcaatctagctcaaatgtgatgttcattcttttctggtctatcagcaagtcggagcatagaggattcaaagccacttaccaatcagatcttccaacgttatgtcaaggagatttcagcaaagaaaacggggtgattaccaatccagaaacaacgaacaaaatttactcttgtcagtgggtccatcagcgtacagatgtagcaaaagaaagaacatttgctgtagccctcacagtaaatactagtcacgaaaaatctgaaagtgcatgttcctattcgccagtcctcgttgaaattactgccgctgataagaagacgagtttgttcaaggtgtgtgccacaacaactgctcccgttgttataagatctccgtttttggttaccaaactatcggctgcagctgcaatgaaattcacactgaactttacagcaacttatagcactcacgactgtggtggcatggttcacgaccagtcaggagttatctcaagtcctggatttccaaacaagccatccaagtcctatgagtgtgcttggcttctttcagtaggtgcaggccaaactataaatataactactctgtcgctatctcttggagatgattgtgaaaagagttacttagtagtttataatggcgaacttcctactcatcctagaataggcaaattctgcaagaacacaaagcctgaagtattgatttcgcagagcaacaaactatggattgagtacaaacatgaccaaacctctacaggtacaggatttatgttgaaatatgaagccatgagttcaggttgtggaggcgtttttcatgatctaaaacgtacaattaggacaccaaattatggcgttggcgactatccacataaagcagaatgcttgtggattattgagtcggaacctggatatcacatcaaattgaatttcgttgaaagattctttatagaacaaagtacaaattgtacaaaggactacgtcgagatttggagttgggatttggaccactggacctctttaggacgaaaatgtggcagagacactccaacatcgttacaatccaagggagaaagaatgaaaattttgttcagaagcaacgaggaaacagctggagctggatttaaggcttcctgggaatggttatgtggaggaacataccttgcagataaaaagacgcgctatattgtcagccctggctaccccatgcagtacaaaaataatctaaagtgtgaatataccatagaaacaaaatctgaagcaattaatctaagattccttgacttcgttttagaaacaggtagacccgattgtaaattcgacaatcttactatagctggtaagacattcccaggatcatatgtttacacaagaaacacatattgtggggacaattcgccagaatcggttaggatgagaggaacagtgattctgacatttatgacagataggtgggttacaaagagagggttcaaactagaatacaaagacgatagttgcggcgaaacaattactgaagaaactgttatagaaaagaaaccaacaaagcaattggaaggtggatcataccgctattatcaaccaaaaattaaatgtatttggaatataactgctccagccaatcaaattgttgtcttacatataaaaaaattgggaatgttcaccagtaccatgtgttatggacaaaatgtagaagtctttagtgatgtaaacatggatcgcgctaatcgtttggcacaattgtgcggtagcataaatgattccttcgtcattccatcggagactggaaaaatgattgtcaagttagaaaccttacccatgtcttttgggggattcatagctgaagtgagctttgctcatggtcctgccgaaggatgtggcggtcatatcaatttgacagactccagggtcattgagtcaccaaacttatctaacttggactgtgtatggcaaatcgtagcaccaagagaccaccaaattgaaattaaaataaaccattttaacatggcaaattgtgcaattaataaaactcaggatgcacatggatgtattggatgtagtatgctggagattcgagatggcgccagtccattttctgaaaaaatagaaactctttgcgtcaatgttaatgaagctgacaatagaccggcaatacgtacgtcaggaaattttggttatatcagacttgcgattaatggactaaagacaaatgctttcaaagttacggtaacatctgtcatgtcaatttgtggtgagtccgtattaacagccactactgaggtgaaaaccctaacgtcaccaggatatgatacaggccattatccatcttacattaaatgcagctacgccatatccacgggaactgtatatgacaaaatcgtccttcacttcgacgagtttgatattaccgatgagatagttgtaactgaagaaaccagggactgtattggagactatattcaaatttacgaagatccaaatcttggcgttaacactggtttgggttcaaatgtcgtgtataatggcgctaatacacatacaaatctgatgtacactgatgttaagggacggcatctattctgtggaaaagacgaaaaacctttcgattactatacatccggacggtccgttactgtatcactggttagcaaagataaaacaccaaaaggaaaaggtttcaagttagaatattcacgagcagggtgtaacagaaattacactgaacctcaaggaagaataactaacggaaatagtaaagtagactgtaaattctcgattatagtagcagaaaacagtacaatctcagtatacttctattcattttacatgtatttaacggcaaattgtacggatagtgcaatggaggtcagagatggttcaccaacaggaaaagtattattgaaagcatgcggttaccgtttacctgatccgatattttctacaacaaataaactctattttaccgcatttaatcataaaataaatggacttttactaagatatgatatgctctatgttagtaccgacgatgaccctggatgtggaggttccattttcacaaacaaaggaaagatctacagtcccttatatccaaacctttataggaaagataaagtttgtgtttggaccataaaggcaccagttggtttacacctggctcttaaatttacaactttcgatatacaaggatcttgtgattatacaaacttaagggtagatactggagccaattctgtagagttatgtaaaaatgccgatcctagaacaatataccgatcaaaatcgacaattaccatcacgtatacttcttctatccacaatggaggcacaggatggattgccatcttccaagcagtatcctcagatgtgacagacatcaattaaaaggtggttgagaagtttgttttctattatgtttttatttagatattgtattaaaaataaaatttgataaataaaaaaa

SEQ ID NO: 94 - DNA, 1530 bp, Diabrotica virgifera virgifera
caaattttgaaaagctgtcagaatatttttctttatttatttatttactaactgttacataaatacaatgaccgaaaaagatatagaagaagtagaagaggctgtaattgacgaaacaagtgaaatagagttacttagtgaagatacagatacgacctctgagagttctgaaaatgcagaacaagtggaagaagagcaagaacaagaacaacaagaacagcctgtacaacaacctaaagatcctctcgatgaattaacataccaacagttagtagatcttgtcaataatatggaggatgaaaacagacatcttcagctagaaaatgcagtgtttatggacttcctcaaaaactatagtccatcagcattagatggattggatacaatgatcaattatgctctatcattggccacgaaacaaactacactagctatgaagtcaagttctctgatgtctgcaacgagcagatcatcaacagttggcagtcttggaggatctagtagaaagagtatgattatgggttctctaccaagtattaacaacttaatggaaggtcgtggtccaaaaataaatatctctacgagaacggacatgattgtaaaggctatagaagaaacgcaacaaagtcttgatcattttgtcaaaaagtctcttagattaaaacggaatataatgtcagatcttcaagaatttaagatgcgagaaactgatattattgacaccagaaatgtttttgaacatctcgtggttactcaaggcttagataagctaacacaaagaatacccgcagaaaaatggattagatttatggacgattggttaaaaaacgctgcattagccatggaaaaactcagacttcgaactgcttccttgaaacttcagtacagaaaagtatctgcaactttaatccaaagacaagaacttggagaaaatgttcatgctgttgacttcgatcaactagaaattgagaataagcatttgctgcaaaagatagaccagaaacagatacatctgttagagctgaaaaggatgaatggaggagctaacttaattttaagtaagcataagaagtaccttctgaagcagcaagtggattataataaaatacaggtaggtataacagaaaaggaacaacagatacatgagttggacgaagaacatgataaggtggaggaagaaagagataaggctaaagaaaaatatgaaaatttcaaagtgtttaaatcaacgtacagagttcccgatgtgatggactatgtcgtgttaaaaaaagaattagacgaattaaggaaaaatataaaaatctggcaaaggagaaagaatatacaagacataagtctgaacgcttctatccgacaaatgaaaaatttgacaggttcttcgactgttgatcccgattggctacaggatcctccgccagaaattgaagatcagtggttatgatatataaatatttcatttgaaaatagacgataggtctatcaaggcctatcaagttataaatatttttaatggagaaagatttttgt

SEQ ID NO: 95 - DNA, 931 bp, Diabrotica virgifera virgifera
gccgccggtatcatgaacagccttgaattcatttaagcaataataatagtaggaatatcattgacatcaatagtaataacaaatattttaatattttaaacactagtcagagttcagagtcagtgtcatcacatccacggttaagcataagcatgtcttgcacacaaataaaacagttagaaacattattaagcaaacaactagttaaaaaaactattaaaaatgttaatattagcaggcttacagctccaggtgaaaactttggtagtataatgtacaaattggatattgtcctgaataataacgataatggtaccgaagaaatacttcgcgcagtggcaaaaacccttccagagactgaattttggaggcaaatatttaatattcaagtaacttacacaagtgaaatggctttttatgaggtagttctgcccacctttcaggaattccagcgcagtttagggattgataacgttatcgactgttttgctgagtgtttagcagtaagaaaaaacttgctagacaacagtgacgttattgatgatgatgctgtgatagtccttgagaatctaatatctaaaggtaagttggtatctttggtctgctatttaataaatctagaagtccccgggtcttttttttgtcgtcaaataataaaaaagtaccgctacatagaggtgtaaaaaagtgcatcttaggaatgtaaatttgatttttaaattttgaatgctaacttagtcctccgtacaacagcaaacagcaaaaaaacagaaagaaacggccacatacacgttgcacagacgcatataaacctttttcatggtccgggtgtaggcatcacccatccattcttggcctagtagtgtttgccaataagtgttactatggcttagaagacagatggtcacaaaactacccagaaaaattaaag

SEQ ID NO: 96 - DNA, 2876 bp, Diabrotica virgifera virgifera
gcgattcatacagcgcacatatacgagattgttccacagatatttttactcgagacttactgcaattttaaaattaaagactagtgacacaaattgtgtgaacggcaaaactcggcgcgttaactttgtgttgtgacgattcgagacagtgacgatatttccggcgtgtgaaattcggcgaaaatctgatcctactgcccttccaatttcggtggaccaggcattgattctcctaaaagatagtagcagtccaaagacgaaaatgtcgaatccgttcgcctttacgatacaagacttcccaaattaaaatcgcagtcaaaatggaaattgtgaaaaggtttttaccctttacgctgctatttatacttcagcatcgaggattgctctgccaacacaaagccgaaaaaacaagaacagagaatgacgacgtttaccaaattaatcgcacatataatttagatatatccaaagagttgcgtccatttagcaatattgaagacgacgaaataagagacatctttaatccagattattataatccaagaataaggtattttagaactaaaagaggtaatccgaccgatagtttagcaacaattaggaaaaaattaaatgatggaaaaagaaaagaagaaatgatggccgctgatgctgatgctcgaatggaaccgaatgatacggattcggcgaaaaaggcagaagctcattccgattatggacataaacaaagaaagacgaacgtggagcaattgtataacagaaacaacgacaaaattaggatccttcatcaacagcacgccgtggaaaaactgcatgaattcgaagctggagtcgactgcgatttcgagaatgattgcgtttggacgtggcggaaagatattgcgaacggattctttatcacctctggcacgaagtacggactcaacgaaacggggcccagaacggatgctgataatagcgaaggaggaagtttccttctcctgaggcctactctcaaggcaacagaattccacgtgcacagtcccccttttgcacccacggtttcgtcttgcaaatttgcagtttccatttatcaagaaaaaatggaaggtggtatgctccgtatcgtcggaagcaaagcagaggagaacacgcagtggttactgaaaagtattgatggagataacagcaagcggtggcgcagatatgaaatgtcagtggggaagatatccaaaaattttacaattattttagaagctgttccttccgataatttagaggaaggtgctgttgtggcgtttgataatattcaactatttcaatgttaccataaaaatgatgattcgtgttcatcacttcaatataaatgtaaagcaacgaaaatttgtattaacagcactagtatttgtgatattactaaagattgtatgcttggcgacgatgaagcacagaattgcgatcaaatgcctttcggagctcgatgtaacttcgaggacgattggtgcggttggcaaaatgttgacgttaaggttttggaatggatccggcataacggatcgacacctacaaattttacagggcccaattacgatcatacgtataaaaatagtactggcaagtacctctatgtaaatatgttggcagataaaacccagtttgcaacgtctgcaactataagaagtgtcgactttaatccaccaccacgagttcatggcaattcttcgtctagatattacaattcgtgtgctattcgcttttatcttcataagactggaaaacataaaagcgctattttattacaaattacagaacttagaccgcatgaaaatgtttccacagaaatgttatggagtttcaatgaccatggtgatcaatgggttagacaagtcattattttaccaaatattacttataggtattttattcgatttgaagccagaaaaggtattagatatataagcgacattgccatcgatgatgtgtcgttgagtcccgaatgttttggacttaatataccgaaagaggatctaaatggttacaactactgggataatagagaacacgaaggtctcaaagaaactaacaaagcatttgttaataaaacaatatataagatatcaagctgcaatggaagaggaagatatggaccaactcaaccagattgttcaaaagcatataacaataccccagtgcacatcaaagtggtccatgaaccaggattaacaggagtacaaaaatggactgttccaaagacaaattattatacattcatactgactggtgctagcggcggcaaaggaagttcttcaatgggttcgtcaagaggcgccatgcttaggactgtaatggagctcacagcaggcacagaaatttatttacttatcggccaagagggaaccagttcctgtgttaagagtcttggtgcccagagaaattcctcctgccattcgaatcaaagttttggtactggaattagaggggttttgaatttaaatattaatgatagtggtggaggtggtggaggtggaacatttatatttttgcgtaaccgaagcaaagaaaagtttccactagctatagctggaggaggaggaggtttgggcttagggcacttcagcgttgataatgtggaacaacatggccgtggtcttactaaggttagacaaccttatacgggaaatatgtatggaagcagaactgctggtgctggaggtggatggaaaatgtttcaaggaatggtagatccaatgcataaagttatgatgggcagttctttattagctggtggtattggaggcaaagcttgttataattccactgatgaacgtggtgatggaggctttggaggtggaggtggtggttgcgtatatggtggtggaggtggagggtttgctgga

SEQ ID NO: 97 - DNA, 4378 bp, Diabrotica virgifera virgifera
atttgtagtttgtaaaatgaatacgacattgagctagaattagatttttatttgctgaacaaattttaattggaccgacttgcgttcgtattcgtatttaaaaaatgaatcagttgtattcgtttttgatatagacaattagataaatcattctgtctggctattagtttttatggatgcattttaatactaactaatgcctcatgacagactttattctacatagttaagaaactgcaataacaattttatggttatacacaaaatagaaggaaagttggtagttagtgcaaaccgaatgcaaaatgggaaacaaaaaaaatgagaatgatttaaaatgtgaaaagaacaaaactaatgaaataagttatcttcgtttgtttcagtactgtactactttggatattatttttatgtcaattggagctatttgtgctgccttaagtggaatagttcaaccatattctatgacattatttggagatgttaccggtgcaatagtaacatacgcttcaaactacaacgaatcacttagtgagccagaaaagactttgttagcagatgaattaataaatgccgtttggctgtttggcatgaagtcggtaggcgttgggataggcgttattttaactacctatatatcaacggtcctttttatttacagcgcatctagacagattttcaaaatcagaaaagcttttcttgagaaaacgcttaatcaagatattgcgtggtttgaccagaatcgtactggagactttgcaagtacattcacacaaaacatttcaaaattagaagagggaattggtgagaaaattggaacttttttattttttgagtcaacctttgtagcaggatgtgttttgggtctagttaaaggatggaaattagcattggtgtgcatggtatcccttcctttatcgactacaattatgacaataatatcatggatatctacaaaattttcagcgcaagaaatggaatcatacggagaagctggtaccatcgctgaagaggtcttcaccgcaatcaaaactgttgttgcttttgatggacaagacaaagaaattgaaagatataataaacacctcgttgatgccaaaaagaataacttaaaacgtagcttttttactgctgtaagtaatggatgcttatggtttttcgtatacgcgtgctacgctttgtcgttttggtatggagtaacgttaatactgaatgacaggcatcttccagaacacgaacaagtttatacaccagcaaatatggtatctgtgttcttttcaacgctaatagctacttggaattttggattaggagctccactactggagacaccattaatactgaatgacagacatcttccagaacacgaacaagtttatacaccggcaaatatggtatctgtgttcttttcaacgttaatagctacttggaattttggattaggagctccactactggagacttttggaacagccaaaggggcagcacaaaaaatatttttcgtattagatagcaaacctgttatcagaaaatttgcaaacagtggaattgtaataaatgatgccgctttggaagtaacatttgaagatgtgcattttagttatccttcaagatcagatgtaaagattcttagaggtataaatcttacaataagtaaaggtgagacagttgcattagttggaaaatctggatgtggtaaatctacctgtattcaattacttcagaggttttacgatccagatatgggtcaaataaagataaatggtatagatattaagcagctaaatttagactggcttaaacaaaagatttccgttgtaagtcaagagccagatttattttccactaccatcgccgaaaacataagatatggaaaactaaatgctactcaacaagaaatagagaatgcagcgaagaaagctgacatccacacatttatacagactttgccgcggggttaccaaacggttctaggagaacgaggaactcagttatctggtggccagaaacaaaagatagccatagctagagctctagtacgaactcccgagtttctacttctagatgaagcgacttcagctctcgatacgacaagtgaggcagaaatacaagaggctttagattcaatacgaggaacctgtacaataataatagttgcacatcggctatcaactatacgacaagcaagtaaaatcgtggtaatcaatgaaggaaaggttttagaaatgggcacacatactgaactaatggatatgaaaggagcttatcacaatctagtaatttctcaaggactaactgaaactttagaagaaaaaggtaatagacgacggagcaggaaattcagtgaagctaacaagtctataaatgaaaaagaagacgaagaacttgaagatacacagattaatcaaccagttgcgaagaacattttatggaaggttttaaaattaaacgcctcagaatggttttatattcttattggctgtttatcttctctcataacgggagcttctttaccaatttatggattagtttttggaggaataatgggaatttttgcaaatgataatgatggagaagtacggagtgagagtaatatgtattgtttatatttcctaatactaggtgtagtcactggagttgcaatgttttggcagacaaccagtttttctgttgctggagaacatttaactctaaaaattaggtcgaaaacatttgaagcaatgttaagacaggaaattggctggtatgaccaaaaaagcaatggagttggggcactgtgtgcacgtctggctggagatgctgtagctgtccaaggggcagctgggccacagataggaacaacaataaactttatttcaacattcatacttacgtgtacgttctcgttttattttgagtggaggacaagctttgtgcttttttctttgtgtcccgtaatattcttttctgtatattttgagcagaaggtattacaagaggatgccacgaaaaaccaaaaaatgttagaagcatctgcaaagttggctgtagaagctatcggtaatataagaacagtggtttctctaggttgtgaaaaagtatttatggaacagtatatcaaagagttattaccgtatcagaaaatggcaagaaaaaagtcacattatcgtggcataatagtaggtttagctagaagtctaatgctgtttgcctatgtagcgggaataagatatggcattaacctaatcatttccggtgattgtccctatggaacaatttttatagtttgtgaagtaatgatagtcggtacatggtcagttggaaacgcattgtctctttctccaaatttccaaaaaggtcttgttgcggcatccagaataataacgcttttagagaggcaaccagtcgtacaaaacatgccagacgccttaaactttttatgggaagatgagaatgtagaatattctgaagtttacttttcataccctacgagaccttcaataccaattctaaaagcattaaacctcttaattccaaaaggaaagacagttgctttggtaggatcaagtggctgcggaaaatcaactattattcaactgctggaaagattctacgatcctagttatggaaaagtggaaattagtgataaaaatattcgatatgttgatttgaagtcgttaagatctcagttgggaatagtctcacaagagccaaatctattcgacaaaactatagctgagaatatagcatatggtgcaaattacaaacaagtggaaatggatgctattattgatgctgctaaatctgcaaatattcatgaatttattttaaatcttccaaagggttacgaaacaaaagtaggtagtaaaggaactcagctctctggaggacaaaaacaacgtattgccatagcacgagctttgctgcgaaatccaaaaatacttttattggatgaggcaacatcagcattagataatgaaagtgaaaagatagtacaagaagctttggacaatgctagaaaaagtcgaacgtgtataaccatagctcatcgcttgacgacaattcaagatgccgatgttatttgtgtactaaaagaaggaaatgtagtagaaatgggaactcataaagagcttctggaaaaacagggtttatattataaattttataaattacaatcggtagagagtatttcttaaaaaaaaatttgtatatttctattaaaaattagtatttagtttagttgaactaatattaaaaacacaagacatattattttgttattgttatatttctacttactaggcatctgtaacatgtttgctatcagaaataaaaatctaaaacctgtgctttcaaatgttttgataaaactaattatgttttttgttcattgtga

SEQ ID NO: 98 - DNA, 3918 bp, Diabrotica virgifera virgifera
gaaatactgtattggcacatatcggtacccacttaaagtacttacctaattagttatattatgttagttaatatgtgaaaaggtgctccatcatttttttaattaatgttttgttactggttaaaattatttttttaatgagtagatatgagaacgaaaaagaatgatattatggaaaaaaacacaaatgctctagatgcaaaatttgtaaaaaagaaagaaaatgagacaaaaattaaacctatatctttttttggaatgtttaaatacgccagtaaaggggacaaactcctgatgtttattggaagtctatcggcagtaatcactggttgtttaccaccaataaatacaattttatttggagaacttgcaggaaatgctgtggaatatgctgaatctttatataacgctactttatcacaaaaagaccaagatgaggcacaggaaaaattctttgatggtattaaatttttcgctttggcaaatagtatggttggagttgcgatgctgtgttttagttatctttctaccataacttttaattattcatcaacgaaacaaatatttaaaattagatctgattatttaaaatccattcttaaccaagatatatcatggtacgatcaaaatcaaacaggggattttgcaagtcgaatgtctgacgatttgtccaaatttgaagatggaataggtgaaaaggtaccaatgtttatacattttcaagtactatttgtagtagcagtaggaactgcattgctcaaaggatgggagctagccttaatatcactagtagcaataccagcatcgttgatatcttttggagtgataaatttgttaacaacaaaattagccaaaaacgaaatggaagcctacgcagcttcaggttcaattgccgaggaagtattttcattaatcagaaccgtaacagcttttggcggacagcaaaaagagattgacagatataaagagcacctggtgtctgcaaaaaagaataatattaagcgaacgatgatcgtcggtattggattcggtttggtgtaccttttattatatagtagttatgcactgtcgttatggtatggggtaaagttggtgttaaaagacaggtttaatcctaatgctagttatactccagcgaatatggtaacgatatttttcgccgtattgtcagcttccctaaactttggtgcagcttccacatatttagaaatgtttgccatatcaaaagcagctgctgcgaagatttttaatgtgattgaaagcaaacctgctataaatttatcaaaatcaaatggggcaaaattggatcaatttaaagggaatattcaatttaaaaatgtcaaatttcactatccatctagaccagatataccgatattacaaggggtggatattgaaattcatcctggggagaccattgctcttgttggaagttcgggttgtggcaaatctacagttgttcaacttatacaaagattttacaatgccgtatctggtgagatcttagtcgatggaacaaatattcaaaatttgaatttaacatggtaccgaaacaatataggtgtagtaggacaagaacctgttttgtttggtacaaccatcctagaaaacattcgatacggaaaagaagaagctacagaagaggaaattatagaagccgcaaaaaaagcgaacgctcatccttttattaagttgttaccaaaaggttataatacactggtaggagaacggggaacccaattgtctggaggacaaaaacaaagaatagctattgctagagccttggttcgaaaaccgactctattgttgttggatgaagcgacatctgcattagataatgctagtgaagctaaagtacaagaggcgctagatttggcgagtgctgaatgtacaacaataattgttgcccatagactgtctacaataagaggagctaacaaaattatagtactccttgaaggaactgtagttgaacaaggaacacatgatgaattaatgtcattaaaatgtgagtattttaagcttgtaacagcccaagttgcaagttccaatcagatcgaattatcaaatgatgaaacagaaacaaaaggcaataatgaagcatatgaagaatataacgacgatgatgatgacatatctgacgatgaaaaaaatgaaatagatgactttaaaaatggcaaaaaaatcactctttttagcatcatgaagttaaatgcaccagaatggccatatattttaattgctggagtaggatctatagtagttggttggggatggccaatatttgctgtgttctttggtagtgttcttggaacactggcaaaatacgatacagagtatatagaaacagaaactacaagatattgtatatttttcgtgattgcgggtgtcatatgtatgatctcagtatttcttcaaaattatctgttaggaatagcgggagagaaaatgacagaacggattcgaacccagatgtttacagcaataatatcccaagaaatgggtttctttgacaaaaaatctaacggtgttggggcattatgcgcaaaattagctggagattcatccagcattcaaggaattgcagttgaagctgtgggaaatataagaactgtggcaggtcttgtcgcggaggataagtttcaaaaaagttatattactgaattgaaaccccactacaaagcagcgttagcagcagtgcattggagaggactagtttttggactgtcacggagtcttggatattttgcttatgctgctgccatgtactatggcggttttcttatacgagatggactatattatgataaagtatttaaggttgctcaagcacaattgatgggaaccatttcaattgctaattctctagcatttacgcctaatttaaacagaggtataagtgctgcgaagaggataaagagtttcctatccagaatcccccttatcagagatggtccaagttcaaaaccaatgaaccaggtagacggtaatataggttattcaaacgtagagtttttctatcccacaagaaaaaatattcaagtactccgtggtctgactatcaatattccaaaaggaagtactgtagcacttgttggtgaaagtggatgtggaaaatccactattatacaactgatagaacgattctacgatccatcttctggagatattaatttagatgaacaaaatattaaacatataactttaagttcgttaagatctcatttaggaatagtgccacaagaaccaaatctttttaataagtctattgctgagaacattgcctacggagacaactctagaaatgttcccattgatgaaattattcaggctgcaaagaacgcaaacattcataattttatagttggattacccaatgggtacgatacagaattaggagaaaaagcaactcaattatcgggtggacaaaagcaaaggattgcgattgctcgtgctttggtacaaaatccgaagattttactcttagatgaagctacatctgctttagacacagaaagtgaaaaggtagtacaagcagctctcgatgaagctaagaagggaagaacatgcatcacaatagcacacagactgacgaccattcaagatgcagatataatatacgttatcgataaaggaatcgttgttgaatcgggaacccacagagagttattaaataaaaatggtttttattataaattgtatactcaaaaacattaggatattaaatgagataaagttcattagcgatactaggattattttaaagatagaaatcacaaagcagagagctacatcaggttactttaaagcagatatcgatagcagccctcgaaccatttatgaaactgaatttcgtttgtggttccctttgtacagactcatgatttttgtattttaataaaatacatttagttgttg

SEQ ID NO: 99 - DNA, 2496 bp, Diabrotica virgifera virgifera
tgtaacctcatttctggcggtcaatgtattacattcacatcctattgtttagttaacaatgataaaatatgtgatagtcattgcaaaccaatgtgtaaacgttgatgtaaataatatatacataatgagataattattatttatcgataggattactgccaaaaccagacaagaatgaatgtatattcagtgatagtcagtagtcataatctatcgaagtcgctcaagcttttgaaattggttaatagtaggagatactttagcaacatgtctcagaaaataagtcaaaataaaacatatatttcagtagaaattccggaaacaaccaaaggtgcctcaagaggatttttcagtagaatttttaaaagaaacaaagaagtaaaagaaaaacaagaacctagattgaaaaaatccgaactcaagagattgttttctcttgccaaacctgaaaaatggaagttaactacagcaataggtttccttgtagtttcgagtacagtaacaatgtcaatcccttatagtttaggaaaaatattagatattatatatgtgggtagtggagactcagatgcagcgagagcacggttaaaccaagtgtgtggtatattgctaggtgtgtttgtgttaggggccatttgtaattatgccagagtttacttaatgtctacagcaggatatagaatgacaaatgctttacgaagacaagtttttggtgcaatattaagacaagaacaaggttggttcgacaaaagacctacaggtgaacttgtgaacagactgtcagcagacacacaaatagtaggatctgctttatctcagaatatatctgatggtttaaggtctctagtcatggtatttgctggtacaggtatgatgttgtacatgtctccacagttggcattggttggtttagcaatagtacctccagtagcagttgttgctgtgctttatggtagatttgtgagaaagatttcaaggaaagtccaagattcgttagcagattctacaaaggtggcagaggaaagaattgcgaatataagaacagtgaaatcatttgcacaagaacctagagaaataactagttataatatttcaattgaaaatgttcttaagtattgttacaaagaagcaaaagcaagagctttattttatggcatgacagggtttagtggtcatattataataatatcagttttgtattatggtggggtgatggtgtcttcaaataccataacagtaggtaatctctcatcattcctactatatgccgcatacattggtatttctgttggtggattatccagtttttattcagaactaaacaaatctttaggggcagcaaccagaatttgggaaataattgacagagaacccacaattcctacccaaggaggtttaattccaatgacagacgttgagggtcatattgagttcaaaaacgttaagttctgttatccttcaagaagtgacattgaaattttcaaaagtttagttttggacatccaaccaggcaaaacgctcgccgttgttggtcctagtggttcgggcaagagtactttagcggcgcttttattaagactatatgatcctatagatggggcagtatacattgataaccagaatattaaggagttagatcctgcatggattaagaaacacatcggtaccgttagtcaagaacccatacttttttcttgttcgataaaggaaaatatactgtatggagcagatgatcctcagaaaatcaatgatgacgaatttataagaatttgtaaagaagccaatgtttacgaatttgttcaaaacctacctgaaggttttgaaactgttgtaggagagagaggggttatgcttagtggaggccaaaaacaaagagtagcaatagctagagctcttatcaaaaatccaaagatactactgttggatgaagccactagtgcgctggatgcccagtctgagcattatgtacaggaagctttagatagagttatgaaaggcagaaccgttttaaccatagctcatagattatctactattcaaaatgccgatattattgctgttctacaaaatggacaaattgtagaacaaggaaagtacgagcagttactacaaaataatggaccttttagagagttggtgcaacatcaaacgttttcgcaattaatggatgactgatttttaatcacggatatatagtagaattgtatataccttaaaaattttatatacaattgttgataactttatttgttttcaaatatacatgttaaaaaggaaacgacccttgtacataaatcggagttatggatttcacagatatttctcagaatgaattttaagtgcttgtaaagtaaccaaccaggttcggatctgccctacttgcctgtaacgtgaaatgaattcgatgaaatgtgaaatatttattatatcagaaaggtacagatagaccaagtgcaaaagtggatttgtttaattttattaaaataaacatataaa

SEQ ID NO: 100 - DNA, 3058 bp, Diabrotica virgifera virgifera
acactgaattgggtgtcagctggatgtctacaacacaaaaatgacagtttttatacgaatgaacactgaatttagtcttactttataatatatatttgttactacagttttaaaccttaatgtagcttaaagaatgtttttttttaagttatacataaaattaaaaccaaactactgttagtgacgcaattcactaaacccagtgttcgtctcgaaatcaagagaaaaattctttaacaatggcgactactactgcacaggtcaacaaaaaaatcttttgagtctgtaatttagtaaatattttctgtttgtatatatcgaaacttcaaaaagaataaataaagtttgcttttgtacctttatgtaatgaaaaataaatatatgtaccatgttttgacagattttttgaggagccgttgcatttaagacgaaagagattggtgagggggattgtgggtgtgaagcagaaagtaccagactggcacgatagtgtgcgcgtgagcattgcaaaggaataacgtattttatgtgttgcgaggacccaaagtataaaaatgtgtaaaaaagtgaaaaaatgacgtgggctctttttgctatattttcggcgaatttatgtgaaagcaaaaaaattttgtttggcatcaatataaaacttggtaaaccctatgacactcattttaacttacccatacaatgtcaagataaaatgtggcaactcatttctcagttattaatcaaaaaacactttagatggtaacacatcatacataaccctggagaacaatttgaaactcaatttctgttgagttagattttttagctgttttctatagaattaggcatgctggtttcaaaactgtttttagttttctcctatcatgtcacgtttgttttctaggggggtggggggaatgacgctccgataaccgcaactggtctagacttgcctgttcctgttcagttacgtccgttatactcagttatactgtggtaaaacgttgtgtgtcggttagcagtatttagtatttcgttgctgaagtgtatagaactactaagtgtctttgaactgaaacgtttccttatggctacctctactcctacacgtcggtcaacgtagaacaatggcgagtagacaacaaaaacaatggagcctttactaataaaactcttaatgaatctttagcaaacgcaacctattctacaaatgacaataaacctccattttggagtacagtgttaacggaagacaacaccttattaatatacagttgcttagtaatacttaccatcatactagcagtgacaagatcgataacgttcttcagattttgcttgagagcttctacgaatctacacaattctatgtttgggaaaattattttttctccgatgttgttctttaatactaatccatctggaagaattttgaatagattttcaaaagatattggagctttggatgagtctttgcctaactgcttggtagatacgattgggattggtctgattgttactggtacaactttagttattgcatcagtaaatccatgggttctcctaccgaccggcgtaatattagttattttctactttataaggcaagcatttttagcatcaagcagagacattaaaagagtagaagctgtaactcgtagtccaatatttacgcatttatcagcatctttgcaaggtctaacaactataagagcttttagagctgaagagattcttactaaagaattcgatcactttcaagatgcttatactgcagcgtactatatgtttttgactgctaatcgtggatttgggttttggctagatctacactgtgtaatttttataggaatggtggtcgtaagcatattgtttatacagaaagaaacttttggtgggaatgtcggcttatcattgactcaagcaataacactttctggaatgttccaatggggtatgcgtcaatggagtgaactcgaaaatcaaatgacatcagtagaaagagtacaagaatacgcagaccttccaaaggaaaaagacgagattaaaaaggagccaccccctaattggccaagcatgggccatatgaagtttgagaacatgtccttgagatattctgatgatagtccatacgtgttgaaaaatctcaactttgaagtcaaacctaaacagaagattggtatagttggtcggaccggtgctggtaaatcttctttgatacaagctgtatttaggttggctcaaaatgagggacacatatttatagatggtatagatagtaagagcgtagaattgagattgcttagatctaagatatcaatcataccccaagaaccagtattgttttcaggaacgctaaggaaaaatttagatccgttcgatgaacacaaagatgaggttctgtgggatgctttggaggaagtagaactaaaacacgccgttgatgaattaccagcaggtctggacagcaaaatggccgaaggcggttcaaacttcagtgttggccaaaggcagctggtctgcttagctagagcgataattagaagaaacaagattctggtactcgacgaagcaactgccaacgtagacccaatgactgattccatcattcaaaccactataagactgaaattttctgaatgtactgtgttaacgatagcacacagattgcacacaatcatggattccgataaggttttagttatggacgctggagaagctgttgaattcgatcatccacacaagctgcttaagaagaaaggggtattctatggattagttcgacaaactggtaccacaatggcagagaacttacaaggaatagcagaagaaagtttttataaacaaattaaggatagtcttcaaaaaaatgttcctgtgattattagccaattttaaattaagaacttttatgagatcataacgacagctgttttgtgacgaataaacatttattgatattaaatttgtttcgtaaaatttggcagcatttaaaattgtacttaatatttttacttaatttgtaccaagtactgtaacgtgacaataaattgtatgttgttct

SEQ ID NO: 101 - DNA, 1581 bp, Diabrotica virgifera virgifera
  misc_feature (891)..(923): n is a, c, g, or t
actgaagagtatatcaacatcataaataaaagagacaactatcttgtgatgtatacattcttaacagtagtgatggtagtactcacctttactagaatatacatgaacttcttctttgctataagagcgtctcgaaatctacatcgcaaaatgttgaaatccgtcataaacgcttttatgagcttcttcgacaaacactttgtgggaaatgttgtgaataggttttctaaagatctgatgactatggacgaagttattcctttgaatacttacgagatatttaggcaaactctaggattactgggaatattgtacttaattatttccgtcaacaaactctttatcattccttcaatatttttatttgtcaagttatattttatacagaagttttatctaccaacggggagaggcataaaaagactggatgctgcaactagaagtccaatgattggatatctaaatgcaacgcttgaaggaataaccgctgttcgagcatttgaaaagcagcccttactaatttcagaattcgatcaacacctagatcattatacatccacttcttatatgatggcgtgtgccattaggttttacggctttatcatggatatggtatcaactacattttttgctgccatagtaataaagtttgtttgttttgagacagatgctcaagctggtgacgttgggttagcaataactcaggcaatgttacttacgggttttctacaatatgttattagacaatataccgaaatagaaaataatatgacaggtatagaaagagttttagaatatactgacattgaatctgaagataaattgcaaggacgttcgttgaaaaactggccttcgtttggagaaataaagtacgaaaacgtctctttagtnnnnnnnnnnnnnnnnnnnnnnnnnnnnnnnnntgttggacgtacaggggctggaaaatcatctattatttcagtattgttcaggctttatgatattgagggtcgtattttaatagacaatgaagatattaagaatttatgtttgaaatatttacgatccagcataggtatcattccacaagatccgatattattttcaggttcaataagagcaaatatggatccatcaggaacccatacggatgcagaaatttggtccgcaatagaaaaagtccatttaaagaatctatttaccagtttagatgatgtcattgttgaaaacggttcacgttatagttctggacaacgccaattgatatgtttggccagagcgttggtcagcaaaaataaaatcattgttttggatgaagcaacgtccaacatggatccagagacttgcagtctcttgcaaaggacaattaaaacacatttttcacaatgtacagtgctaaccatagctcacaaattaaatactgtgttggattgtgataggataatggttgttgatcacggtgaaattatagagtttgatactccacaagccttgagaacaaaacaaggtggtatctttaacaaaatgattgaacattcaggaatacaagattaaaatattttttgtgtaaaagatgtaaataaacttttttatttatta

SEQ ID NO: 102 - DNA, 2980 bp, Diabrotica virgifera virgifera
gaattgaaaactttacttaaagccacatattcaaagatgtctcttggaattaccagcagtttagtcgcaagattctctctttattctgtactaatgatctacatatggatacacaacgatatgagtgcagaagatatctactacatcatgaaaatatttggtgctcttagggtgacagtagcaaaggacttttcgatagggtttactaaaattggagaattatcagcatctttaaaaagaatctcaaatgttcttgaacttgaagagttgcccgaagttgaagatatacctgatagtgacccttacgttagcttgaagtgtgtttcattaaaatttcaagaaaaaattgttttaaaagatatttcactggaactagtaaaaggtttgaacatcgtaactggacaattaggttgcggaaaaagttctttaatcaaagtgatactaagagattatcctgaagatgagggtaccgttaataccagaggcaggatgagttacgcctctcaggacccatggctgtttccgtcttccattaaacaaaatatcctgtttggagaggaatataatgcttttaaatataaacaggttatttttgcctgtgctctggaatacgattttcaaattttagaaagaggggatgagacaatagttacggatagaggcatgaatttaagtaagggccagcaagctagaattaacctagcgagagctgtgtataaagaaagccatatttacctgatagatgatgctcttactgctttggatagtagagttcaagaacatatctttaaatattgtattcaagagttattgaaagataaatgcgtaatttttgttacccataatcccaagcacatacaatcggcagataaaattgtaattctaaaagaaggggaaataaaattttccggaaatcaacgaaatatttccacagacctgttagaaggattaaaaacgttatctgtaaatgaatcagaagcaacaatagatgaagaggaagttaacgagaagacaaaactaattgaagaagagacaacgacaatccgtaggaaacaagtttaccacgaggacaagaaatctggaaacattgattttaaactatattttcggtatatcaagatgggtggatatattttaagtactctactggttattactttcggtgtctactggttattactttcggtgtggaaatttttttggatagcgtatcacaaaaattgttaagcagttggataaaccaaaaagcttatattacgcgtcaaaaggaagtatacataaaaaatacgacagcagatatggatcaactacttactttagccaactattctacaaccattttcctcaattccactttgaacgtatcatcaagtgcaataaaagaaattagttatcttgaaggagcagcttctagcactatgaatttgtataccatttcaacagtcgttttggctggtatggagttgattaaaagatatcttatattaaaagtaggaatgaaagcttcaataaatctgcatgataatatggttaacaaagttctaaaagctacgatgaccttttacgacaacttttttattggtaacattctcaataggttttctcaggatttcggcgttgttgacgaacatttaccaattatcatgtcgtcttttgtagggaattactttcatttgctaggtatagttggattaatagcatcagtaaactggaagtttattgtaccggcgattgtaatggctatcacatcaatactcattcgttctatctatattcgcacagcaagaagcttaaaacgtctagaagctgcaacaagaagtccaattgtgggacatctgaactcaactatggaaggtttaacaacaataagagcttacaaagcacaagaaatactaaaatttgagttcgacaaacatcaggacttgtataccagtgcgttctacacttcagtatgtactaaagccgcgttctcatttattatgaacttttctgccctcctgtttgtaactacagttgttatacgatttttattctttgacaatggatcttttgctggagatgtgggattaacattaacccaagctggagtcttaacatcaattatcaacacaggattgatgacttggtcagagctagaaaatgaaatgacctccgttgaaagagtaatggagtatacacaggtcgaatcagaacggagcactggggttgaagttagtaattggccaagcaaaggagaaatagtctacgaaagggtatcattaaaatataccaattcacaggagaatgtattgaaggatatttcctttaaagttagaccgggcactaaaattggcatagttggaagaactggggctggtaaatcttccattatttctacgctgtacaggttatataactacgaaggccaaatatacatcgatggtacagaaattaaaactttatcattaccgttccttagacaacatatatctattattcctcaagatcccataatgttttcaggaagtataagaagtaacatagatcctttggaacaattcacagatgaagatatttggcaaacgttacacaaggtacaacttaataatgccgtaccacatcttcaggctcaagttggagatttaaatttcagtacaggccaaagacaactgatctgtttagcaagagccattataaaaaggaataaaattgttgttctagatgaagcaacggctaacatggaccctgaaacagaacgaacagctcaaaaaattatcgatgaaaacttttctgcttgcactattctaataatagctcataggttagatgccatactcgattgtgataaagttatggttttagatagaggtcaagttatagagtttgatgaacctaatgtgttattaaataacgaaagcagcttatttgcagaaatgattagaaacgccaaagttaatgatataaacaatgatgtatacgataagaaaaaattgtaataaaa

SEQ ID NO: 103 - DNA, 1731 bp, Diabrotica virgifera virgifera
  misc_feature (1124)..(1178): n is a, c, g, or t
ccaccactattttaccgttaaataacactgctacgacgctgaatctcaccaatgatgatccatacgcagactggtggctaactccaatatttactgacaacactgtgttctactacagtattcttattttagtcattattgtattgtgtttgatacgttctttagccttctatagctggagtttaacggcttcgacgaggctgcacaacaaaatgtttgctaacgtagtatacagtccgatgaggttcttcaatgtcaacccttcaggaagaattcttaataggttttccaaagatataggatccatagatgaagcgttgcctagaacattgttggatacagtacaaattggtctgatggcaattgcaaatagtttcgttataggaacactgacagtttggatcctcattcctacaatattaactgcaatattgttttattttctacgaaaggtttacgttagtacaagtagaaatgtgaagagggtggaatcagttactagaagtccagtatttacgcatctctctcaatctctacaaggactaacaaccatcagagcatttagagctcaagaaatactcaaaaacgaattcgacaactaccaaaatttaaacagtgctgcatacttcctctatttctcctgcgccaggacttttggatattggctggactttttttgtctgatatactttacgttggtcctagcgtcgctaatatttattgaaggggaacaatatggaggaaacatgggtttggccctaactcaagctatggccataactggaatattacaatatggcatgcgtcaatggagtgagttcgaaaaccaaatgacgtcagtcgaaagagtacaggagtacgcagatttggtacaagaggaagacagccattctagtgaacctgctaaaacatggccccgagagggaagggttgaattcaacaatatgtctttaaaatacgccccagaagatccagcagtactcaaaggattaaactttgttatacaacccagggagaaaattggtatcgtgggaagaactggagcggggaaatcgtctctaatccaagcactgttccgactggctcatattgacggaagtattttaattgatggagttgatacnnnnnnnnnnnnnnnnnnnnnnnnnnnnnnnnnnnnnnnnnnnnnnnnnnnnnnngaggtcctctggaatgctttggaagaagtagaactaaaacatgcagttgatgagttacctgcagctttagacagtaaaatggcagaaggaggttcaaacttcagtgtcggtcaacgacaattggtgtgtctagcaagagctatagtaagaaacaacaaaattctcgttttagatgaagctacagcaaacgtagatccgcatactgatggtctaatccaaaaaacaattagacaaaagtttgctaactgcacagtactaactattgctcataggctgcatactattatggattgtgataaagttttggtgatggatgctggtaaaaatgtcgaattcgaccaccctcacgatcttctccaaaatacaaaaggaatattttactcgttggtgatgaaaactggaaaggctactgcaaagaatttgatagcagtagcagagcaaagtaaaaaagaaaaaagtcagaatgtttaatgaatataatttaagctttaataaaacgaatagtttatagttaggttgttaataatgttattttttttaaataaaactctaa

SEQ ID NO: 104 - DNA, 3745 bp, Diabrotica virgifera virgifera
ctccatcatttttttaattaatgttttgttactggttaaaattatttttttaatgagtagatatgagaacgaaaaagaatgatattatggaaaaaaacacaaatgctctagatgcaaaatttgtaaaaaagaaagaaaatgagacaaaaattaaacctatatctttttttggaatgtttaaatacgccagtaaaggggacaaactcctgatgtttattggaagtctatcggcagtaatcactggttgtttaccaccaataaatacaattttatttggagaacttgcaggaaatgctgtggaatatgctgaatctttatataacgctactttatcacaaaaagaccaagatgaggcacaggaaaaattctttgatggtattaaatttttcgctttggcaaatagtatggttggagttgcgatgctgtgttttagttatctttctaccataacttttaattattcatcaacgaaacaaatatttaaaattagatctgattatttaaaatccattcttaaccaagatatatcatggtacgatcaaaatcaaacaggggattttgcaagtcgaatgtctgacgatttgtccaaatttgaagatggaataggtgaaaaggtaccaatgtttatacattttcaagtactatttgtagtagcagtaggaactgcattgctcaaaggatgggagctagccttaatatcactagtagcaataccagcatcgttgatatcttttggagtgataaatttgttaacaacaaaattagccaaaaacgaaatggaagcctacgcagcttcaggttcaattgccgaggaagtattttcattaatcagaaccgtaacagcttttggcggacagcaaaaagagattgacagatataaagagcacctggtgtctgcaaaaaagaataatattaagcgaacgatgatcgtcggtattggattcggtttggtgtaccttttattatatagtagttatgcactgtcgttatggtatggggtaaagttggtgttaaaagacaggtttaatcctaatgctagttatactccagcgaatatggtaacgatatttttcgccgtattgtcagcttccctaaactttggtgcagcttccacatatttagaaatgtttgccatatcaaaagcagctgctgcgaagatttttaatgtgattgaaagcaaacctgctataaatttatcaaaatcaaatggggcaaaattggatcatttgaaagggaatattcaatttaaaaatgtcaaatttcattatccatctagaccagatatacataaatttatcaaaatcaaatggggcaaaattggatcaatttaaagggaatattcaatttaaaaatgtcaaatttcactatccatctagaccagatataccgatattacaaggggtggatattgaaattcatcctggggagaccattgctcttgttggaagttcgggttgtggcaaatctacagttgttcaacttatacaaagattttacaatgccgtatctggtgagatcttagtcgatggaacaaatattcaaaatttgaatttaacatggtaccgaaacaatataggtgtagtaggacaagaacctgttttgtttggtacaaccatcctagaaaacattcgatacggaaaagaagaagctacagaagaggaaattatagaagccgcaaaaaaagcgaacgctcatccttttattaagttgttaccaaaaggttataatacactggtaggagaacggggaacccaattgtctggaggacaaaaacaaagaatagctattgctagagccttggttcgaaaaccgactctattgttgttggatgaagcgacatctgcattagataatgctagtgaagctaaagtacaagaggcgctagatttggcgagtgctgaatgtacaacaataattgttgcccatagactgtctacaataagaggagctaacaaaattatagtactccttgaaggaactgtagttgaacaaggaacacatgatgaattaatgtcattaaaatgtgagtattttaagcttgtaacagcccaagttgcaagttccaatcagatcgaattatcaaatgatgaaacagaaacaaaaggcaataatgaagcatatgaagaatataacgacgatgatgatgacatatctgacgatgaaaaaaatgaaatagatgactttaaaaatggcaaaaaaatcactctttttagcatcatgaagttaaatgcaccagaatggccatatattttaattgctggagtaggatctatagtagttggttggggatggccaatatttgctgtgttctttggtagtgttcttggaacactggcaaaatacgatacagagtatatagaaacagaaactacaagatattgtatatttttcgtgattgcgggtgtcatatgtatgatctcagtatttcttcaaaattatctgttaggaatagcgggagagaaaatgacagaacggattcgaacccagatgtttacagcaataatatcccaagaaatgggtttctttgacaaaaaatctaacggtgttggggcattatgcgcaaaattagctggagattcatccagcattcaaggagctactggacaacgagtgggtgcaatactgcaatctctttcaacgttcggtatagcaatagctctgtcaatgtattaccaatggaaactaggtctgctaatggcatcctttacaccattaatgttggttgcaatatttatagaaaaacgtaacactacaggtctaagtgaggccagagaaaagtccttacaaaaatctacaaagattgcagttgaagctgtgggaaatataagaactgtggcaggtcttgtcgcggaggataagtttcaaaaaagttatattactgaattgaaaccccactacaaagcagcgttagcagcagtgcattggagaggactagtttttggactgtcacggagtcttggatattttgcttatgctgctgccatgtactatggcggttttcttatacgagatggactatattatgataaagtatttaaggttgctcaagcacaattgatgggaaccatttcaattgctaattctctagcatttacgcctaatttaaacagaggtataagtgctgcgaagaggataaagagtttcctatccagaatcccccttatcagagatggtccaagttcaaaaccaatgaaccaggggtacgatacagaattaggagaaaaagcaactcaattatcgggtggacaaaagcaaaggattgcgattgctcgtgctttggtacaaaatccgaagattttactcttagatgaagctacatctgctttagacacagaaagtgaaaaggtagtacaagcagctctcgatgaagctaagaagggaagaacatgcatcacaatagcacacagactgacgaccattcaagatgcagatataatatacgttatcgataaaggaatcgttgttgaatcgggaacccacagagagttattaaataaaaatggtttttattataaattgtatactcaaaaacattaggatattaaatgagataaagttcattagcgatactaggattattttaaagatagaaatcacaaagcagagagctacatcaggttactttaaagcagatatcgatagcagccctcgaaccatttatgaaactgaatttcgtttgtggttccctttgtacagactcatgatttttgtattttaataaaatacatttagttgttaaaaaaaa

SEQ ID NO: 105 - DNA, 2921 bp, Diabrotica virgifera virgifera
gtggtgtggtggagactggtgagtcagtttcagttatgtagagtcgccttctctgctcacatcgtagcgaacaaagcgctttgtattgtctgtactgtacgcgtctcaacaagaacaaagtgttgttggaatataaaagtaatgttttgtgtgtctcttgctgtctatttcagtgcttaatttttgttcgttttgttttgttgggccttttttaactaaatgtaagtactgaacgcgtttcaaatttttctaatctgaacgcgtttcaaatttttctaatttagattgtgctttgtttgtctaaacagtacgtgattcgatggtgtcccagctcatgacaaaggattatattgaatgagtagtgctggataacgaaaaaaggatgacggctaaatgaaaatggcatcacctacaccgtcaatagaatcaatacctagagcaagttcaattggatcattcggtgatcaagcaagttcaattggatcattcggtgatcaacacgactacttatccttatcgcctttggcggattcaccattgtcagtaagcggctcatcgcccccagtaagtgactcagtagacagagacagtgatcactctgaactacattgtcaacagtgcagagatcccgtttcagacccaaaattgttagcctgttttcacacgttttgtaacgcttgtctcgaaaagaacaaactcatctgtccccgttgcaacactgaatcaatcgagggcatcttgaatagccttctcttcaacacagagaacagcaacgatttccattcggctgctgtccgttgcacaggctgcaaacataagaaactagacgcagtcgcccgttgtgtcgagtgtgccaactatttgtgttccaattgcgtcatggcacatcaatttatgcactgtttcgaaggccacagggttgttaacctgccagagatcaaagatgaacccaaaaacggagtaatctccaatggtatcatgggcatcatatccaataccgagaaaagtatgatctgccctcgtcataaagcagaattgttaaagtattattgtcgcacctgcgccgtaccaatttgtaaagaatgtttggctttggatcatcccatcggactccacgactatgaacacatcagcgaagctgcaccaaaacagatcgaagctattcagcacgctgtaaccgaagcaaagagcaaagctaccgatatcagaaatatccttaaaaatgtagaacacgtttccagtcgtcttcagattcaatatcaaaaagctcaaaacgaaatcaatgacactttcctattctacagatccatgttggaggaaagaaagcaggaacttctcaaagaattagagagcgtttttagcgcaaaacaaatatcattgggagtggccacgcaaaagggccaagaaacgtgcgaacaaatttacaaaacctgcgaatttgtagagagactgaataaatgtgcaaatgttgttgaaatacttatgtttagaaaattattagataataaattacaaggtcttttaaattataacattgatcaaagcgtgcaagcagcatgcgagttggaattcgtatccaactatcaagccatacaagtaggcgtcagaaatacttttggttatgtgagatcaaactcagagccagtggtgggtccaagcaagcagccccccatcgctagacctacaggcggtggtggatcaagctccagcggaagcagcgtcaacggaagttccggtagtctaaacggtgggatgatctgttcgttccccatgtccaactcaagtcaatctacatctcctttcgaatcaaacataatcagcaaacgattcagcagtgccaacagtttgggtccgttttcaacgacaataggagacttaaatctcaatggtattaacccttacgagaagtggtccaacggtggaactacggacagtattttccaaaatggaactgcggatccatacgcgctaagcggtactacacataatgaccccatgctagatctgacttctaaactcatgtcgactgcgatctttcccccgaaatctcaaataaaacgacaaaagatgatttaccattgcaagtttggagaattcggtgtcatggaaggacaatttaccgaacccagtggagtagccgtgaacgcccaaaacgacataatcgttgccgatacgaataaccacagaatccaaatcttcgacaaagaaggccgatttaagtttcagtttggcgagtgcggtaaacgcgacggacaattgttgtatccaaatcgcgttgctgtagtacgcacatccggggatattatcgtcacagaacggtctccgacacaccagatccagatctataaccaatacggtcaattcgttcgcaagttcggagcaaatatcctccagcatcctcgtggtgttaccgtagacaataagggacgaatcgtcgtcgtggagtgcaaagttatgagagtgatcatcttcgatcaaaccggtgcggtcctgcagaagttcggctgttcgaagcatttggagttccctaatggcgtcgtcgtgaacgacaaacaagaaatctttatcagtgacaaccgagctcattgcgttaaagtattcagctacgaaggagtctacttacgacagatcggtggagagggtatcaccaattacccgattggagtaggcataaacgccaatggggagattttgattgcggataaccataacaacttcaatttgacgatttttacccaagacggccagttggtgtctgcgttggagagcaaagtcaagcacgcgcaatgcttcgacgtggccctgatggacgacggttccgtggtgttggccagcaaggactacaggctctacatatatcgttacgtgcaggtacctcccatcggcctgtaaagaacgtttcctccaggcagggtctccag

SEQ ID NO: 106 - DNA, 10220 bp, Spodoptera frugiperda
actatcacactacgtcataaaaagcattagattagggcgacgaattagaaaatactttgacactttctataatttataattattattcgatttttcacgttgttgctattaaatacacaaaaatttgtgtctgttttaagttttaagctttgttgatataaaacttttatcaagatgtaccccgttggtcaagctccagcgggggacacgaatgctggtgcagtgagtgtagcgggggcagtgaccgcggctgcgagcacgactggtgctgcgcccggagtccccagcactgcccccgccaccggagcaaccgctcctggtgctgctgggggtgctggcgccatgagcctcgtgtcacctgctgcaccgctagcggatttaccaacactcacatgcccgcgccgccccaacctcggccatgaaggaagacccataatgctgcgagctaatcatttccaaatatcaatgccaagaggatttgttcatcattatgatgtaaacatacagccagataaatgtcctagaaaggtgaatagagaaattgttgaaaccatggttcattgttacaataaaatatttggcgcactaaaacctgtatttgatggtagaaataatttgtatacaagagatcctttaccgattggtaatgataaggttgaattggaggttatattacctggagagggtaaggaccgagtgtttcgtgtcagcatcaaatgggttgcacaggtctcattgtttgctttagaagaggctcttgaaggtagaaccaggcagataccatatgatgccatcttagctttagatgttgtgatgaggcatcttccttccatgatgtacacccctgtgggacggtcatttttctcttcacctgaagggtactaccacccccttggtggtggcagagaagtctggtttggtttccaccaatctgtaagacccagccaatggaaaatgatgcttaatattgatgtttctgcaactgccttttataaagcgcagccagtcatagagtttatgtgtgaagtccttgacatacgagacattaatgatcaaagaaagccactgacggactcacagagagttaaatttacaaaagaaatcaaaggtctcaagattgaaatcactcactgcggcaccatgaagaggaaatacagagtatgtaatgtgacccgacgcccctcacagatgcaatcgtttcctcttcagttagaaaatggacaaacagtagaatgtactgtagcaaaatatttcttggataagtataagatgaaattgaggtatcctcatctgccgtgtctacaagtaggtcaagagcataaacatacatacctaccactggaggtctgcaatatagtgcctggacagagatgtattaaaaagctaactgacatgcaaacatctactatgatcaaagctacagcgcgctccgctcccgacagggaaagagaaatcaataatctggtgcgacgggcgaatttcaacactgacttgtatgtgaaggaatttggtttgacgatctcaaacaatatgatggaggttcgcggccgagtattgccaccacccaagctacagtatggcggccgcgtttcctcgctaggcgggcagcaagctttaccaaatcaaggagtgtgggacatgagaggcaaacagttctttatgggtgttgagatacgggtgtgggcaattgcttgctttgcaccgcagagaactgttagagaagacgctttgaagaacttcacacagcagctacagaagatatcgaatgacgccggaatgccgatcattgggcagccatgcttctgcaagtacgcgacggggcctgaccaagtggagcccatgttcaagtacctcaagagcacattcgtacagttgcagcttgtcgttgttgtattgccagggaagacacctgtctatgctgaagtgaaacgtgtgggagataccgtattaggaatggcgacacagtgtgttcaagcaaagaacgtgaacaaaacttcgccacagaccctaagcaatttgtgcttgaagataaacgtcaaacttggtggcattaactctatcctggtgccatcacttcgtcctaaggtgttcaacgagccggtgatattcctgggcgtggacgtgacgcacccgccggcgggcgacaacaagaagccgtccatcgccgccgtggtcggctccatggacgcgcacccctcgcggtacgccgccaccgtgcgcgtgcaacaacacagacaagagatagtgcacgaaatgagcagcatggtgcaggagctactcatcatgttctacaagagcaccggcgggttcaagccgcatcgtatcattatgtaccgggacggtatctccgagggacagttcctacatgtcttgcaacacgaactcactgctgtccgagaagcttgtatcaagttggaggcggagtataagccgggaatcacgtttattgtggtgcaaaagcggcatcacacgcgactattctgtgctgacaaaaaggagcagtcgggaaagtctggaaatatccccgcaggaactactgtcgacctcggcatcacgcatccgaccgagttcgatttctatctatgcagtcatcaaggaattcaaggtacgtcgcgtccgtcgcactaccacgtgctgtgggacgacaaccacttcgggtcggacgagctgcagtgcctgacgtaccagctgtgccacacgtacgtgcgctgcacgcgctccgtgtccatcccggcgcccgcgtactacgcgcacctggtggcgttccgcgcgcgctaccacctggtggagaaggagcacgactcgggcgagggcagccaccagtcggcctgcagcgaggaccgcacgcccatcgccatggcgcgcgccatcaccgtgcacgccgtcaccaagaaggtcatgtacttcgcctaaccgcacgccgcgccttcgaggtaatgttagtcgagcgtgcgaaatttctggggcttctctatactttaaaatattatctccgcacgaagatctcgtatgttaacgcgtccgattgtcgttgtcattcccttctccggttcgtgcagcaatttcccgaagctgggagtgaccctgtgaggtcttcatgttttgagataggactccgcctattttctggtttgttcttgtatatacctaacgccaaccgtttctatcaggttctgacggccccactcgcgtttcatatagtctaattttataaatgttgtttagcttttatgaagatagctgtcccaacataaaagacgtttcaatcctgagaagttttgatagtgatggaacaatcgaaataaatcgttgacaattatttgatgtataagtataataataatcggaggagagcaataaatattacctcatgcgtgtaaagcgtagtgtttcctatttggccatccgttgactgggctatttactatcttctaagaagcatttgtagaattcaacttaagctttttaaataaaacaaagaagtgcgattaatttaataagtggatattttatcgtcatttgaaactagaaaaagaaaatgttagtgacagacagacattcaaataaatatattttatgaaatttataaataagtctacagtaaaatacatacaaaaaaagattttctcgtaaacataactggttaatttcaaacatagtttaataggaaagtgaacataatacaaagctacactgaagtctaacaaaacgagcacttgatagaggattatttgatttgcgaagtttttgatagtgaatttaaataagtagattcatattttgtaatgatctaaattattgtggtatcacacaaataagtatccactgtttttcattaatctgtagtctttacaagattatgctacataaatcagtgagtagtattaagcagtaacgccaaatagtcctcattaggtgtactaaggatataataatatgtatttatttttcaatgatttaaattatcattaatttcattatgttatgagttcagtttataagtacctattttattttcaatgcttcgtttaatttttgcacattgattcaatgaacttcacataaccacatacactatgtatataaaacaaattattataaacatacaaccaatcttactatcagtgtaaagaatgatatttttattttacatttttaagtttatttttaaagtaagagttcttttataatgtatttttagctttaagtttaatcaactaaaagttgggaagaacgtatgtcctgactttaggagttggtgacaaatgttttcttttttgtaattagtgtgaaagttaataaacatttttttatcataaattatgctttttggtgttttaattggtcgtatgtcagtgttattttgtctcaatatatgcataattatatgcaatttgtatagttcgtaattttcatggataatcggattcttatttacttaacatatttgtacgaaatggtatagacacaccattaaatatctcatgatttgccatattccatatacagcgaatttaattatatgatctgaattcatgttcattaattaaattgtaacataatattgattcaaattaatatagaataggcatactcaaattgctttttcgtggaaagaagtggtgtcaaagtaaataatcgcccggttatcttataagtggacaagctgctaaaaatatcggatataaatgtattttatattaaatgacgttgtgatgctaggtgtgatacattaatacgaatatgttcaagatcgttgttatagaacaaaataaaatcgaaaatgcaagtgatgtcagtggggaacttgcgaaatagattctttattatacatcttttgtccttattatgaaggtgtttcttttaaattctaactgtcggcatcatatcatatttacgataagctcgtactagtgagaatcagccctcttatagttgataaacgttgttcttcgcagttataatgattatgatataattttcagagttaacacccagtcgcttgcagttttattagaattaaattttattgtttattgaagaactatcctttcttttttactaacactacccctttttacgtggcgttaagaatgctctcatttcatgtttcaagactaatataaagtgaaaataaaatgacgaatattcgataccagctacacaatcaaacagataaaaatggggtaatgttgacagtaatcgcgtttagtttttattttgttttatagtaagctttcgtagactcctttaaagaagtacgactgtagcgaccgtgttatattattaattactgagcatttaaagcaaatgtcactttggttatagtttagtaggtattatgtaactagcacacccagttgacgcctttatttgaaatcgatagctttctcattttcgctgtttcgttaggacgctgtatacttgacgtgaagttcttgtggaaaactttctactaaaataggttagcagctcgaatatttattcaaaacactcatccaaattacgtctttgatttaaaaaatattgacgctttcttgcgcaaatgaatagcgcagcttttggggtaacatttcatcttaaaatatatacaacgtgctttaaactgtagttaagttgtcgtatataagtgggttttggtagcaaaatgtctatacgcgcgatttgccaactagtgaagaccacgtgcattgtgcgagcttctttgtaattcatgttttgtatgaagaagctccatctgcgcaatcttcatgcattatttttgatgattataaatttgggcggctacggtattgcgtcataattattagttattgtttccttttcgttcagtggcactatttcatctttgacctaaagatagttcgtctatctctttttgttgtgaatcttttgaagatgtattcaaacatataacacctatcagatttttgaaagttagagttgaagtaatttcgtattattatgttttttttttttcatattttgttatttataggtacggagttggttggttggtagaatttcggctaactcgaatatttttcatacaactatcagctaaaatccagatttatgtcagttttagtcgttcaaccagaagttgtgcacaaatcaattaaattgaattaaatgtatttatttgttttcatttttcgtttcgtttctttcgtagtacttacatttgttcagtactgtaacaatgtgttcactatcgcttttctactcattacttatactagtcgattaatattttatttaagcggacataaaagtcgtgggaatgccaaaggcctttttgagactttgtagaaggattgtaacacataacttccaaagttaaattcattctctccaaagactagcccagcaaatctgtgtgacggcatggggtcagagcttagaataaacaatagtattatgtttactccgtgtatttttcttattcaaatcatcacttccaaacaatatttagtttcggacgtcggctttaactatttttaatgtattcataactactaccgacacttttttagtattgatttgtattaaaactccatttcttgtaggatatttactatgtccacgcataaaaaattggaaagaggaaatacgttacaaatgtaaaccctctgtataaaaggatgcattataaatatgtatgtatgttatgtatcactatcatttatttaagacggatttgtaatgtgtttcagaaaatggggctatgttttgacaaccaaaaatattacaatagttttgttgatacgaatttatgtgtgtatctatgagatctctatagcatatttgatttgatttaacaataatattcctcaaatggggacaggaacagaaacgtacctataccaaagcagatcgtttcatatattatgtagcaataggtccacaaacaatcttgtagtatattgaattgaccctcggacgagttagctactgccatacatccgcccggctagcttccaatcttttatatctctcgtactttgttgttgatataactatatatacaaccaatataagtatatatgaaatgaattgttttgttatatagcgccgtttgtagtcacaagaaactaatacgcttaacgagtggaaagtaaatttagtaggacgacaactattttgtaatacacgttatatacaaacaaacaaacaaatatgaaatgcggtttttaaggcaatatttattatcaaattttgaaccaaataacgttggtaagattatagagaccaatgtcagaaaagacaaaatatgtaacattacctaataacaccaatcataaacaattaaatgttaatctaagtaaatatgtatgtatgtgtagagttgttttcaatagggataatgacggtatgaaaaaacaaaagcttaaaatttggaacgaaaaaaaatacgtccaaaatcatcgtggtttacaataaattacagtcggtactttacagcttagtataaaatgtacggaagcctgatgtcatgtaattcgactgtatgaatcgcccatagtttattgaaaacgtgaaaacagaattaatacgtgttctggacaaatatagtcattagtcatcatccctattattaatgtggaatcagtatcgtattatgatgtcaagtgaatgtaatttgttctctcgaaatgtacacgtgtctctaaattataaaatcaaggccggctttattaataaattagttatttaaatgctttatgtaatttgtttaataaatgttattcgatatacacttatattataaaattattaggtatttgattattagtggttagtttacacaaataggaatatacaggaggtcggatatacatgttgagtgataaaatatttgatcaaataaaagtcttcatttaattttctaaattgaaatccaaagaaatacagctactttgacccatagagcccagttgttataacaatttattggtggcaggaatatttataccttttataataaggcttaagttttgtttcttctatggcctctagaagtgtatgatatctaaaagaacttatatgttgccttgaaacactggtttgcatcagtgtgtgatcaaataactatttataatattaaaagagaaaactagagtccacaacgtaacactaagacagttcacttatgtcataagaagctttattttatagttttcatatttgttctattagaaagaaagaaaaaaaatcttgttacttaatatgcctgaatatgtggcatgtgtgtctagaattttacaatgcacattactaattaactaaaataggacgcgattgatttaaatataagatttattttgtaataagctatactaaacttataaacaagggataatgattctgtaatttgtaagatatgttaatggtcctaggattagttatgtaatattagattcggattgttttactcagcgatctttatttgaaatatttattttaacgacagattcttaaatgttaatgttaatagcattttggctcacaagaatttgttgttgttgacttgggataacatcattttgacacataaaaagcggtgcgaatttaatacttacataacttgaatagaaccaaatgtgtatgttgccataatatgcaaccaatcataaagcaataacaagtaactaagtactcaaacattgtaactgatgccaggtattaactgtactccaaattatatattattgttgatcgtttcacaggtatagtagtttagttttagcaagtaagcctttattgctttaaaaaaggagaaaataattattaattgcttagtgtaatcaattaagatagttaataatattcacaggatcaacatacaattagtttttataatacatagaagcagcggtacagttaagtgtaaccaggtatcggtatcctctatatcaacaattgaatttacttcgtaagtccgtgtgcctggcgtcggaattcatctgcgtctctatagatacaatttggagcacaaattaaaaacagtaaaattttataagaatatgtttattacctacttataagcattagattaaagcgcggtagaatctatcaatgctggtagtacgctaccacgcagatcgcaaaattcgcccaacatataagtaaattaattagagtagataattataatatcgctaataacttagctgtatgtgagcaatgtagccagtctaaacagtttccttgtattaagtccgatgtcacccccgcactttcaatcgtttcaatatattttcacttaaccgattcgttgcggatggcacgacaggcgtgccatccaatttttttacatatggcgtatgacacgcgtgtcgtgtcattaaatgtcttttatctcgctcaaatcgaaatttctcgaggtgcttcttgaaaaaaagaaaaaagaacattttattctgtacatggctgatggcacaataggcgtgtcatcaactgatatggcgcttgacacgactgtcgtgtcacgaaatatttgttcgtcgccacgcataaaagtgcaccaaaatgggcgtcgcaacgaatcggttaaataatatttactatattttgtataatattaaatttcaattatatgtttgttttttattattattatagtcgaagtatgaacaaagtgatttaatgcaataacgactttgtttgtccttcattattttaagatatttagttgcttctctatatacttcagtatagctacacatgtaaatgtgagcttggtaatgattaaataactattttgtacaagcttgatgatctgtccatatctaataatgaaaggcttaccatctcgatgtagtaggcactctaatactaacatggatgtttgccaggtttacaattacgtgggtagctaggttacttaggttataacccattgcttgtgtttgtttggaaaacattagttgttaattattttataaacagacaatgcttcgtactcacataatatgactccaatgacacatttttatcatgatgtcttcaagtagggtttccattttttcatagatgataaatagattcaaatttcttcgtgcagggtaaacacgagttatggtacgtcggaatgtatgtaatatttgtgaagtagcgctcaatttgcgttatatttactattgtgtaattaaatgttctctaccctaaaaggttttttatttgatttcttattggtccacctcatacatccttattct

SEQ ID NO: 107 - DNA, 10270 bp, Spodoptera frugiperda
acactatcacactacgtcataaaaagcattagattagggcgacgaattagaaaatactttgacactttctataatttataattattattcgatttttcacgttgttgctattaaatacacaaaaatttgtgtctgttttaagttttaagctttgttgatataaaacttttatcaagatgtaccccgttggtcaagctccagcgggggacacgaatgctggtgcagtgagtgtagcgggggcagtgaccgcggctgcgagcacgactggtgctgcgcccggagtccccagcactgcccccgccaccggagcaaccgctcctggtgctgctgggggtgctggcgccatgagcctcgtgtcacctgctgcaccgctagcggatttaccaacactcacatgcccgcgccgccccaacctcggccatgaaggaagacccataatgctgcgagctaatcatttccaaatatcaatgccaagaggatttgttcatcattatgatgtaaacatacagccagataaatgtcctagaaaggtgaatagagaaattgttgaaaccatggttcattgttacaataaaatatttggcgcactaaaacctgtatttgatggtagaaataatttgtatacaagagatcctttaccgattggtaatgataaggttgaattggaggttatattacctggagagggtaaggaccgagtgtttcgtgtcagcatcaaatgggttgcacaggtctcattgtttgctttagaagaggctcttgaaggtagaaccaggcagataccatatgatgccatcttagctttagatgttgtgatgaggcatcttccttccatgatgtacacccctgtgggacggtcatttttctcttcacctgaagggtactaccacccccttggtggtggcagagaagtctggtttggtttccaccaatctgtaagacccagccaatggaaaatgatgcttaatattgatgtttctgcaactgccttttataaagcgcagccagtcatagagtttatgtgtgaagtccttgacatacgagacattaatgatcaaagaaagccactgacggactcacagagagttaaatttacaaaagaaatcaaaggtctcaagattgaaatcactcactgcggcaccatgaagaggaaatacagagtatgtaatgtgacccgacgcccctcacagatgcaatcgtttcctcttcagttagaaaatggacaaacagtagaatgtactgtagcaaaatatttcttggataagtataagatgaaattgaggtatcctcatctgccgtgtctacaagtaggtcaagagcataaacatacatacctaccactggaggtctgcaatatagtgcctggacagagatgtattaaaaagctaactgacatgcaaacatctactatgatcaaagctacagcgcgctccgctcccgacagggaaagagaaatcaataatctggtgcgacgggcgaatttcaacactgacttgtatgtgaaggaatttggtttgacgatctcaaacaatatgatggaggttcgcggccgagtattgccaccacccaagctacagtatggcggccgcgtttcctcgctaggcgggcagcaagctttaccaaatcaaggagtgtgggacatgagaggcaaacagttctttatgggtgttgagatacgggtgtgggcaattgcttgctttgcaccgcagagaactgttagagaagacgctttgaagaacttcacacagcagctacagaagatatcgaatgacgccggaatgccgatcattgggcagccatgcttctgcaagtacgcgacggggcctgaccaagtggagcccatgttcaagtacctcaagagcacattcgtacagttgcagcttgtcgttgttgtattgccagggaagacacctgtctatgctgaagtgaaacgtgtgggagataccgtattaggaatggcgacacagtgtgttcaagcaaagaacgtgaacaaaacttcgccacagaccctaagcaatttgtgcttgaagataaacgtcaaacttggtggcattaactctatcctggtgccatcacttcgtcctaaggtgttcaacgagccggtgatattcctgggcgtggacgtgacgcacccgccggcgggcgacaacaagaagccgtccatcgccgccgtggtcggctccatggacgcgcacccctcgcggtacgccgccaccgtgcgcgtgcaacaacacagcgagggcaagtgtgcaagttgcaccgactcaccgttagggttctataaacaagagatagtgcacgaaatgagcagcatggtgcaggagctactcatcatgttctacaagagcaccggcgggttcaagccgcatcgtatcattatgtaccgggacggtatctccgagggacagttcctacatgtcttgcaacacgaactcactgctgtccgagaagcttgtatcaagttggaggcggagtataagccgggaatcacgtttattgtggtgcaaaagcggcatcacacgcgactattctgtgctgacaaaaaggagcagtcgggaaagtctggaaatatccccgcaggaactactgtcgacctcggcatcacgcatccgaccgagttcgatttctatctatgcagtcatcaaggaattcaaggtacgtcgcgtccgtcgcactaccacgtgctgtgggacgacaaccacttcgggtcggacgagctgcagtgcctgacgtaccagctgtgccacacgtacgtgcgctgcacgcgctccgtgtccatcccggcgcccgcgtactacgcgcacctggtggcgttccgcgcgcgctaccacctggtggagaaggagcacgactcgggcgagggcagccaccagtcggcctgcagcgaggaccgcacgcccatcgccatggcgcgcgccatcaccgtgcacgccgtcaccaagaaggtcatgtacttcgcctaaccgcacgccgcgccttcgaggtaatgttagtcgagcgtgcgaaatttctggggcttctctatactttaaaatattatctccgcacgaagatctcgtatgttaacgcgtccgattgtcgttgtcattcccttctccggttcgtgcagcaatttcccgaagctgggagtgaccctgtgaggtcttcatgttttgagataggactccgcctattttctggtttgttcttgtatatacctaacgccaaccgtttctatcaggttctgacggccccactcgcgtttcatatagtctaattttataaatgttgtttagcttttatgaagatagctgtcccaacataaaagacgtttcaatcctgagaagttttgatagtgatggaacaatcgaaataaatcgttgacaattatttgatgtataagtataataataatcggaggagagcaataaatattacctcatgcgtgtaaagcgtagtgtttcctatttggccatccgttgactgggctatttactatcttctaagaagcatttgtagaattcaacttaagctttttaaataaaacaaagaagtgcgattaatttaataagtggatattttatcgtcatttgaaactagaaaaagaaaatgttagtgacagacagacattcaaataaatatattttatgaaatttataaataagtctacagtaaaatacatacaaaaaaagattttctcgtaaacataactggttaatttcaaacatagtttaataggaaagtgaacataatacaaagctacactgaagtctaacaaaacgagcacttgatagaggattatttgatttgcgaagtttttgatagtgaatttaaataagtagattcatattttgtaatgatctaaattattgtggtatcacacaaataagtatccactgtttttcattaatctgtagtctttacaagattatgctacataaatcagtgagtagtattaagcagtaacgccaaatagtcctcattaggtgtactaaggatataataatatgtatttatttttcaatgatttaaattatcattaatttcattatgttatgagttcagtttataagtacctattttattttcaatgcttcgtttaatttttgcacattgattcaatgaacttcacataaccacatacactatgtatataaaacaaattattataaacatacaaccaatcttactatcagtgtaaagaatgatatttttattttacatttttaagtttatttttaaagtaagagttcttttataatgtatttttagctttaagtttaatcaactaaaagttgggaagaacgtatgtcctgactttaggagttggtgacaaatgttttcttttttgtaattagtgtgaaagttaataaacatttttttatcataaattatgctttttggtgttttaattggtcgtatgtcagtgttattttgtctcaatatatgcataattatatgcaatttgtatagttcgtaattttcatggataatcggattcttatttacttaacatatttgtacgaaatggtatagacacaccattaaatatctcatgatttgccatattccatatacagcgaatttaattatatgatctgaattcatgttcattaattaaattgtaacataatattgattcaaattaatatagaataggcatactcaaattgctttttcgtggaaagaagtggtgtcaaagtaaataatcgcccggttatcttataagtggacaagctgctaaaaatatcggatataaatgtattttatattaaatgacgttgtgatgctaggtgtgatacattaatacgaatatgttcaagatcgttgttatagaacaaaataaaatcgaaaatgcaagtgatgtcagtggggaacttgcgaaatagattctttattatacatcttttgtccttattatgaaggtgtttcttttaaattctaactgtcggcatcatatcatatttacgataagctcgtactagtgagaatcagccctcttatagttgataaacgttgttcttcgcagttataatgattatgatataattttcagagttaacacccagtcgcttgcagttttattagaattaaattttattgtttattgaagaactatcctttcttttttactaacactacccctttttacgtggcgttaagaatgctctcatttcatgtttcaagactaatataaagtgaaaataaaatgacgaatattcgataccagctacacaatcaaacagataaaaatggggtaatgttgacagtaatcgcgtttagtttttattttgttttatagtaagctttcgtagactcctttaaagaagtacgactgtagcgaccgtgttatattattaattactgagcatttaaagcaaatgtcactttggttatagtttagtaggtattatgtaactagcacacccagttgacgcctttatttgaaatcgatagctttctcattttcgctgtttcgttaggacgctgtatacttgacgtgaagttcttgtggaaaactttctactaaaataggttagcagctcgaatatttattcaaaacactcatccaaattacgtctttgatttaaaaaatattgacgctttcttgcgcaaatgaatagcgcagcttttggggtaacatttcatcttaaaatatatacaacgtgctttaaactgtagttaagttgtcgtatataagtgggttttggtagcaaaatgtctatacgcgcgatttgccaactagtgaagaccacgtgcattgtgcgagcttctttgtaattcatgttttgtatgaagaagctccatctgcgcaatcttcatgcattatttttgatgattataaatttgggcggctacggtattgcgtcataattattagttattgtttccttttcgttcagtggcactatttcatctttgacctaaagatagttcgtctatctctttttgttgtgaatcttttgaagatgtattcaaacatataacacctatcagatttttgaaagttagagttgaagtaatttcgtattattatgttttttttttttcatattttgttatttataggtacggagttggttggttggtagaatttcggctaactcgaatatttttcatacaactatcagctaaaatccagatttatgtcagttttagtcgttcaaccagaagttgtgcacaaatcaattaaattgaattaaatgtatttatttgttttcatttttcgtttcgtttctttcgtagtacttacatttgttcagtactgtaacaatgtgttcactatcgcttttctactcattacttatactagtcgattaatattttatttaagcggacataaaagtcgtgggaatgccaaaggcctttttgagactttgtagaaggattgtaacacataacttccaaagttaaattcattctctccaaagactagcccagcaaatctgtgtgacggcatggggtcagagcttagaataaacaatagtattatgtttactccgtgtatttttcttattcaaatcatcacttccaaacaatatttagtttcggacgtcggctttaactatttttaatgtattcataactactaccgacacttttttagtattgatttgtattaaaactccatttcttgtaggatatttactatgtccacgcataaaaaattggaaagaggaaatacgttacaaatgtaaaccctctgtataaaaggatgcattataaatatgtatgtatgttatgtatcactatcatttatttaagacggatttgtaatgtgtttcagaaaatggggctatgttttgacaaccaaaaatattacaatagttttgttgatacgaatttatgtgtgtatctatgagatctctatagcatatttgatttgatttaacaataatattcctcaaatggggacaggaacagaaacgtacctataccaaagcagatcgtttcatatattatgtagcaataggtccacaaacaatcttgtagtatattgaattgaccctcggacgagttagctactgccatacatccgcccggctagcttccaatcttttatatctctcgtactttgttgttgatataactatatatacaaccaatataagtatatatgaaatgaattgttttgttatatagcgccgtttgtagtcacaagaaactaatacgcttaacgagtggaaagtaaatttagtaggacgacaactattttgtaatacacgttatatacaaacaaacaaacaaatatgaaatgcggtttttaaggcaatatttattatcaaattttgaaccaaataacgttggtaagattatagagaccaatgtcagaaaagacaaaatatgtaacattacctaataacaccaatcataaacaattaaatgttaatctaagtaaatatgtatgtatgtgtagagttgttttcaatagggataatgacggtatgaaaaaacaaaagcttaaaatttggaacgaaaaaaaatacgtccaaaatcatcgtggtttacaataaattacagtcggtactttacagcttagtataaaatgtacggaagcctgatgtcatgtaattcgactgtatgaatcgcccatagtttattgaaaacgtgaaaacagaattaatacgtgttctggacaaatatagtcattagtcatcatccctattattaatgtggaatcagtatcgtattatgatgtcaagtgaatgtaatttgttctctcgaaatgtacacgtgtctctaaattataaaatcaaggccggctttattaataaattagttatttaaatgctttatgtaatttgtttaataaatgttattcgatatacacttatattataaaattattaggtatttgattattagtggttagtttacacaaataggaatatacaggaggtcggatatacatgttgagtgataaaatatttgatcaaataaaagtcttcatttaattttctaaattgaaatccaaagaaatacagctactttgacccatagagcccagttgttataacaatttattggtggcaggaatatttataccttttataataaggcttaagttttgtttcttctatggcctctagaagtgtatgatatctaaaagaacttatatgttgccttgaaacactggtttgcatcagtgtgtgatcaaataactatttataatattaaaagagaaaactagagtccacaacgtaacactaagacagttcacttatgtcataagaagctttattttatagttttcatatttgttctattagaaagaaagaaaaaaaatcttgttacttaatatgcctgaatatgtggcatgtgtgtctagaattttacaatgcacattactaattaactaaaataggacgcgattgatttaaatataagatttattttgtaataagctatactaaacttataaacaagggataatgattctgtaatttgtaagatatgttaatggtcctaggattagttatgtaatattagattcggattgttttactcagcgatctttatttgaaatatttattttaacgacagattcttaaatgttaatgttaatagcattttggctcacaagaatttgttgttgttgacttgggataacatcattttgacacataaaaagcggtgcgaatttaatacttacataacttgaatagaaccaaatgtgtatgttgccataatatgcaaccaatcataaagcaataacaagtaactaagtactcaaacattgtaactgatgccaggtattaactgtactccaaattatatattattgttgatcgtttcacaggtatagtagtttagttttagcaagtaagcctttattgctttaaaaaaggagaaaataattattaattgcttagtgtaatcaattaagatagttaataatattcacaggatcaacatacaattagtttttataatacatagaagcagcggtacagttaagtgtaaccaggtatcggtatcctctatatcaacaattgaatttacttcgtaagtccgtgtgcctggcgtcggaattcatctgcgtctctatagatacaatttggagcacaaattaaaaacagtaaaattttataagaatatgtttattacctacttataagcattagattaaagcgcggtagaatctatcaatgctggtagtacgctaccacgcagatcgcaaaattcgcccaacatataagtaaattaattagagtagataattataatatcgctaataacttagctgtatgtgagcaatgtagccagtctaaacagtttccttgtattaagtccgatgtcacccccgcactttcaatcgtttcaatatattttcacttaaccgattcgttgcggatggcacgacaggcgtgccatccaatttttttacatatggcgtatgacacgcgtgtcgtgtcattaaatgtcttttatctcgctcaaatcgaaatttctcgaggtgcttcttgaaaaaaagaaaaaagaacattttattctgtacatggctgatggcacaataggcgtgtcatcaactgatatggcgcttgacacgactgtcgtgtcacgaaatatttgttcgtcgccacgcataaaagtgcaccaaaatgggcgtcgcaacgaatcggttaaataatatttactatattttgtataatattaaatttcaattatatgtttgttttttattattattatagtcgaagtatgaacaaagtgatttaatgcaataacgactttgtttgtccttcattattttaagatatttagttgcttctctatatacttcagtatagctacacatgtaaatgtgagcttggtaatgattaaataactattttgtacaagcttgatgatctgtccatatctaataatgaaaggcttaccatctcgatgtagtaggcactctaatactaacatggatgtttgccaggtttacaattacgtgggtagctaggttacttaggttataacccattgcttgtgtttgtttggaaaacattagttgttaattattttataaacagacaatgcttcgtactcacataatatgactccaatgacacatttttatcatgatgtcttcaagtagggtttccattttttcatagatgataaatagattcaaatttcttcgtgcagggtaaacacgagttatggtacgtcggaatgtatgtaatatttgtgaagtagcgctcaatttgcgttatatttactattgtgtaattaaatgttctctaccctaaaaggttttttatttgatttcttattggtccacctcatacatccttattct

SEQ ID NO: 108 - DNA, 10048 bp, Spodoptera frugiperda
cactatcacactacgtcataaaaagcattagattagggcgacgaattagaaaatactttgacactttctataatttataattattattcgatttttcacgttgttgctattaaatacacaaaaatttgtgtctgttttaagttttaagctttgttgatataaaacttttatcaagatgtaccccgttggtcaaggtaggtgttataggtactctatgggagctctactttgtttgattgttccaaataaaaccgcaagacaagagccacaagtatcacgatgtatcgttaagacattttgattttgtgttaattttgaaactaaatttggaaatgggtaaattacacagctccagcgggggacacgaatgctggtgcagtgagtgtagcgggggcagtgaccgcggctgcgagcacgactggtgctgcgcccggagtccccagcactgcccccgccaccggagcaaccgctcctggtgctgctgggggtgctggcgccatgagcctcgtgtcacctgctgcaccgctagcggatttaccaacactcacatgcccgcgccgccccaacctcggccatgaaggaagacccataatgctgcgagctaatcatttccaaatatcaatgccaagaggatttgttcatcattatgatgtaaacatacagccagataaatgtcctagaaaggtgaatagagaaattgttgaaaccatggttcattgttacaataaaatatttggcgcactaaaacctgtatttgatggtagaaataatttgtatacaagagatcctttaccgattggtaatgataaggttgaattggaggttatattacctggagagggtaaggaccgagtgtttcgtgtcagcatcaaatgggttgcacaggtctcattgtttgctttagaagaggctcttgaaggtagaaccaggcagataccatatgatgccatcttagctttagatgttgtgatgaggcatcttccttccatgatgtacacccctgtgggacgttcatttttctcttcacctgaagggtactaccacccccttggtggtggcagagaagtttggtttggtttccaccaatctgtaagacccagccaatggaaaatgatgcttaatattgatgtttctgcaactgccttttataaagcgcagccagtcatagagtttatgtgtgaagtccttgacatacgagacattaatgatcaaagaaagccactgacggactcacagagagttaaatttacaaaagaaatcaaaggtctcaaaattgaaatcactcactgtggcaccatgaagaggaaatacagagtatgtaatgtgacccgacgcccctcacagatgcaatcgtttcctcttcagttagaaaatggacaaacagtagaatgtactgtagcaaaatatttcttggataagtataagatgaagttgaggtatcctcatctgccgtgtctacaagtaggtcaagagcataaacatacatacctaccactggaggtctgcaatatagtgcctggacagagatgtattaaaaagctaactgacatgcaaacatctactatgatcaaagctacagcgcgctccgctcccgacagggaaagagaaatcaataatctggtgcgacgggcgaatttcaacactgacttgtatgtgaaggaatttggtttgacgatctcaaacaatatgatggaggttcgcggccgagtattgccaccacccaagctacagtatggcggccgcgtttcctcgttaggcgggcagcaagctttaccaaatcaaggagtatgggacatgagaggcaaacagttctttatgggtgttgagatacgggtgtgggcaattgcttgctttgcaccacagagaactgttagagaagacgctttgaagaacttcacacagcagctacagaagatatcgaatgacgccggaatgccgatcattgggcagccatgcttctgcaagtacgcgacggggcctgaccaagtggagcccatgttcaagtacctcaagagcacattcgtacagttgcagcttgtcgttgttgtattgccagggaagacacctgtctatgctgaagtgaaacgtgtgggagataccgtactaggaatggcgacacagtgtgttcaagcaaagaacgtgaacaaaacttcgccacagaccctgagcaatttgtgcttgaagataaacgtcaaacttggcggcattaactctatcctggtgccatcacttcgtcctaaggtgttcaacgagccggtgatattcctgggcgtggacgtgacgcacccgccggcgggcgacaacaagaagccgtccatcgccgccgtggtcggctccatggacgcgcacccctcgcggtacgccgccaccgtgcgcgtgcaacaacacagacaagagatagtgcacgagatgagcagcatggtgcaggagctactcatcatgttctacaagagcaccggcgggttcaagccgcatcgtatcattatgtaccgggacggcatctccgagggacagttcctacatgtcttgcaacacgaactcactgctgtccgagaagcttgtatcaagttggaggcggagtataagccgggaatcacgtttattgtggtgcaaaagcggcatcacacgcgactattctgtgctgacaaaaaggagcagtcgggaaagtctggaaatatccccgcaggcactactgtcgacctcggcatcacgcatccgaccgagttcgatttctatctatgcagtcatcaaggaattcaaggcacgtcgcgtccgtcgcactaccacgtgctgtgggacgacaaccacttcgggtcggacgagctgcagtgcctgacgtaccagctgtgccacacgtacgtgcgctgcacgcgctccgtgtccatcccggcgcccgcgtactacgcgcacctggtggcgttccgcgcgcgctaccacctggtggagaaggagcacgactcgggcgagggcagccaccagtcggcctgcagcgaggaccgcacgcccatcgccatggcgcgcgccatcaccgtgcacgccgtcaccaagaaggtcatgtacttcgcctaaccgcacgccgcgccttcgaggtaatgttagtcgagcgtgcgaaatttctggggcttctctatactttaaaatattatctccgcacgaagatctcgtatgttaacgcgtccgattgtcgttgtcattcccttctccggttcgtgcagcaatttcccgaagctgggaatgaccctgtgaggtcttcatgttttgagataggactccgcctattttctggtttgttcttgtatatacctaacgccaaccgtttctatcaggttctgacggccccactcgcgtttcatatagtctaattttataaatgttgtttagcttttatgaagatagctgtcccaacataaaagacgtttcaatcctgagaagttttgatagtgatggaacaatcgaaataaatcgttgacaattatttgatgtataagtataataataatcggaggagagcaataaatattacctcatgcgtgtaaagcgtagtgtttcctatttggccatccgttgactgggctatttactatcttctaagaagcatttgtagaattcaacttaagctttttaaataaaacaaagaagtgcgattaatttaataagtggatattttatcgtcatttgaaactagaaaaagaaaatgttagtgacagacagacattcaaataaatatattttatgaaatttataaataagtctacagtaaaatacatacaaaaaaagattttctcgtaaacataactggttaatttcaaacatagtttaataagaaagtgaacataatacaaagctacactgaagtctaacaaaacgagcacttgatagaggattatttgatttgcgaagtttttgatagtgaatttaaataagtagattcatattttgtaatgatctaaattattgtggtatcacacaagtaagtatccactgtttttcattaatctgtagtctttacaagatgatgctacataaatcagtgagtagtattaagcagtaacgccaaatagtcctcattaggtgtactaaggatataataatatgtatttatttttcaatgatttaaattatcattaatttcatgatgttatgagttcagtatataagtacctattttattttcaatgcttcgtttaatttttgcacattgattcaatgaacttcacacaaccacatacattatgtatataaaacaaattattataaacatacaaccaatcttactatcagtgtaaagaatgatatttttattttacatttttaagtttatttttaaagtaagagttcttttataatgtatttttagctttaagtttaatcaactaaaagttgggaagaacgtatgtcctgactttaggagttggtgacaaatgttttcttttttgtaattagtgtgaaagttaataaacatttttttatcataaattatgctttttggtgttttaattggtcgtatgtcagtgttattttgtctcaatatacgcataattatatgcaatttgtatagttcgtaattttcatggataatcggattcttatttacttaacatgtttgtacgaaatggtaatatagacacaccatatctcgtgataatatacagcgaaatgaatgatttgatctgaaattatgttcattaaattaaattctaacataatattgcttcaaattaatataatatataggcatactcaaatagctttttcgtggaaaaaagtggtgtcaaagtaaataatcgcccggttatcttataagtggacaagctgctaaaaatatcggatataaatgtattttatattaaatgacgttgtgatgctaggtgtgatacattaatacgaatatgttcaagatcgttgttatagaacaaaataaaatcgaaaatgcaagtgatgtcagtagggaacttgcgaaatagattctttattatacatctttggtccttattatgaaggtgtttcttttaaattctaactgtcggcatcatatcatattatacgaaaagctcttactagtgagaaacagccctcttgtagttgataaacattgttcttcgcagttataatgattatgatataattttcggagttaacaaccagtcgcttgcagttttattagaattaaattttattgtttattgaagaactatctttttttttactaacactacccctttttacgtggcgttaagaatgctctcatttcatgtttcaagactaatataaagtgaaaataaaatggcgaacattcgataccagctacacaatcaaacagataaaaatggggtaatgttgacagttaacgcgtttagtttttaattttgttttatagtaagcttgcatagactccttcaaacaagtacgactgtagcgaccgtgttatattattaattattgagcatttaaagcaaatgtcactttggttatagtttagtagatattatgtaactagcacacccagttgacgcctttatttgaaatagatagctttctcatttgcgctgtttcgttaggacgctgtatacttgacgtgaagttcttgtggaaaactttctactaaaataggtttgcagctcgaatatttattcaaaacactcatacaaattacgtctttgatttaaaaaaatattgacgccttcctgcgcaaatgaatagcgcagcttttggggtaacatttcatcttaaaatatatacaacgtgctttaaactgtagttaagttgtcgtatataagtgggttttggtagcaaaatgtctatacgcgcgatttgccaactagtgaagaccacgggcattgtgcgagcttctttgtaattcatgttttgtatgaagaagctccatctgcgcaatcttcatgcattatttttgatgattataaatttgggcggctacggtattgcgacataattattaattattgtacccttttcgttcagtggcactttttcatctttgacctaaagttagttcgtctatctctttttgttgtgaatcttttgaaaatgcattcaaacatataatgccatgtatcagatttttgaaaattagagttgaagtaattttttattgtattttgttattgtataggtacggagttggttggttgattggtagaatttcggataactcgaatatttttcatacaactatcggctaaaatccagatttacttatatcagttttggtcgtccaacccgaagctaagtgcacaaatcaattaaatggaattatatgtatttatttgttttcattttgtttctttcgtagtacttacatttgttcagtactgtaacaatgtgttcactatcgcttttctactcattacttatactagtcgattaatattttatttaagcggacataaaagtcgtgggaatgccaaaggcctttttgagactttgtagaaggattgtaacacataacttccaaagttagattcattctctccaaagactagcccagcaaatctgaatgacggtatgggctcagagcttagaataaacaatagtattatgtttactccgtgtattgttcttgttcaaatatcattatcatttccaagcaatatttaattatcctttttaatttattaataattactcccaacacttttttagtactgatttgtattaaaactccatttcttgtctccattactatgtctacgcataaagaaataggaaagagaaaaatatgttacaaatgtaaaccgttggtataaaaaggtgcattacttttaattaatgtatgtatgttatatatcactatcatttagttaagacggttttgtaatgtgtttcagaaaatggggctatgttttgacaaccaaaaatattacaatagttttgttgatacgaatttatgtgtatctatgagatctctatagcatatttggtttgatttaacaatactattcctcagatggggacaggaacagaaacgtacctataccaaagcagatcgtttcatatattatgtagcaataggtccacaaacaatcttgtagtatattgaattgaccctcggacgagttagctactgccatacatccgcccggctagcttccaatcttttatatctctcatactttgttgttgatataactatatatacaaccaatataagtatatatgaaatgaattgttttgttatatagcgccgtttgtagtcacaagaaactaatacgcttaacgagtggaaagtaaatttagtaggacgacaactattttgtaatacacgttatatacaaacaaacaaatatgaaatgcggtttttaaggcaatatttattatcaaattttgaaccaaataacgttggtaagattatatagaccaatgtcagaaaagacaaaatatataacattacctaataacaccaatcataaacaattgaatgttaatctaagtaaatatgtatgtatgtgtagagttgttttcaatagggataatgacggtatgaaaaaacaacaaaaatacgtccaaaatcatcgcggtttacaataaataaagtactggctcaacagtcggtactttacagcttagtataaaatgtacggaagcttgatgtcatgtaattcgactgtatgaatcgccaatagtttattgacaacgtgaaaacagaattaatacgtgttctggacaaatatagtcattagtcatcatccctattattaatgtggaatcagtatcgtattatgatgtcaagtgaatgtaatttgttctctcgaaatgtacacgtgtctctaaattataaaatcaaggccggctttattattaaattagttatttaaatgctttatgtaatttgtttaataaatgttattcgatatacacttatattataaaattattaggtatttgattattagtggttagtttacacaaataggaatatacaggaggtcggatatacatgttgagtgataaaatatttgatcaaataaaagtcttcatttaattttctaaattaaaatccaaagaaatacagctactttgtcccatagagcccagttgttaaaacgatttattggtggcaggaatatttataccttttataataaggcttaagttttgtttgttctatggcctctagaagtgtatgatatctaaaagaacttatatgttgccttgaaacactggtttgcatcagtgtgtgatcaaataactatttataatattaaaagagaaaactagagtccacaacgtaacactaagacagttacttatgtcataagaagctttattttatagttttcatatttgttctattagaaagatgaaagaaagaaaaaaatcttgttacataatgcctgaatatgtggcatgtgtgtctagaattttacaatgcacattactaattaactaaaataggacgcgattgatttaaatataagatttattttgtaataagctatactaaacttataaacaagggataatgattctgtaatttgtaagatatgttaatggtcctaggattagttatgtaatattagattcggattgttttactcagcgatctttatttgaaatatttattttaacgacagattcttaaatgttaatagcattttggcacataaaaatttgttcttgttgactcaggataacattattttgacacataaaaagcggtacgaatttaatacttacataacttgaatagaaccaaatgtgtatgttgccataatatgcaaccaatcataaagcaataacaagtaactaagtactcaaacattgtaactgatgccaggtattaactgtactccaaattatatattattgttgatcgtttcacaggtatagtagtttagttttagcatgtaagccatattgctttaaaaaaagaaaaaaataattattaattgcttagtgtaatcgattaagatagttaataattcacaggatcaacatacaattagtttttataatacatagaagcagcggtacagttaagtgtaaccaggtatcggtatcctctatatcaacaattgaatttacttcgtaagtccgtgtgcctggcgtctgaattcattttcgtattcagattcaatgcgtcgtcagatacaatttggagcacaaattaaaaacagtaaaattttataagaatatgtttattacctacttataagcattagattaaagcgcggtagaatctatcaacgctggtagtacgctaccacgcagatcgcaaaattcgcccaacatataagtaaattaattagagtagataattataatatcgctaataacttagctgtacgtgagcaatgtaaccagtctaaacagtttccttgtattaagtccgatgtcacccccgcactttcaatcgtttcaatatttaaatatattttcacttaaataatatttactatattttgtataatattaaatttcaattatatgtttgttttttattattattatagtcgaagtatgaacaaagtgatttaatgcaataacgactttgtttgtccttcattattttaagatatttagttgcttctctatatacttcagtatagctacacatgtaaatgtgagcttggtaatgtttaaataacaattttgtacaagcttgatgttttgtcgatgtctaataatgaaaggcttaccatctcgatgtagtgggcacctgaatactatcttggatgcttgccaggtttacatttacgtgggtagctagattacccattgcttgtgtttgtttggaaaacattagttgttaattattttataaacagacaatgcttcgtactcacataatatgactccaatgacacatttttatcatgatgtctttaagtagggtttccattttttcatagatgataaatagattcaaatttcttcgtgcagggtaaacacgagttatggtacgtcggaatgtatgtaatatttgtgaagtagcgctcaatttgcgttatatttactattgtgtaattaaatgttctctaccctaaagatgttttttatttgttttaatattaattgtccacctcataca

SEQ ID NO: 109 - DNA, 4313 bp, Spodoptera frugiperda
aacagactaccaaaataaatgtcacatttgcagtttggcagaaagtattcactgatagttgagtcggtgttttaatatttctcgcaaattgctgaaaatattataaattctcgacatatagacaatattctgtgaagtgtgtttaaaatgctgtgtttcttgctctgattactaggttataatgtctacatcaagtaatatttcgcagtcgacatattccccatcagaaccagaaactccccaaaatacagcacaaagcagaattcaaaatttcgaccaatcactgaatcacgctgatcttggactgagtattgaacagtctatgaaaagtgctcaaaaagaaatgcatcaaaaacgaattcaagctttgagaactgagcttgagtatctaaaagccactgaatgggagtttgagtatgacaagggatttgttcagtaatagatataccaaatcggagattttattaatacctacattagcagaaaaaataaatcaagatggttttctcattaatcaagtcagtttataattatttcttttctaaatcttcatttgaagaatatgatcggcagatggaaatatatttagccgaagaacttacaaaattggcattagatgatgatgacgatattgtgcaaagaacggagcctgaacataatcccagtgattgttttcaaaggactggagtagtaagttacatcgacgagcatggaagctatgtgcttattgatggcatgttctatttcaatatggagggatgttcaatccatgtagctcaaaatgacaaggtcgtgtatttgtgctacaaggaagcagatgaatcaatagtagttgtccgaatactacaaaaccttggggaacattggggtgactttgaagtggatgttgatgagcgtggttttcccgtcagagaacatgttattgttggtgaagtagagtaccggcaggaccgaatggtgattataaaagagagtgatctctcattcagtctggacaaggtggttgcaactttcgtcccagtacagggagacttactggaactaatgtgcaaggttaaatacgatgaagataaccctacagatgtttccagtaaccaggtggttgaagtaatttcattcagaccactgagacataaagtggtaccttcggaaataaaacaatggaacggaaaggagggaatttgtcacaaccagatttattttaatatatcctcatgtatgatcaatggtggagagccacatgtcggagccaagacttttattgaagccatagagagtaaccaaggttcctgctcgtggagagttctaaaaatggaagtaacagacaaagccaaagttgtacaagacaatcctgaagttgataacattgaaaaaaatagtctagagattgaagcaaataataacatagaagtgacttaccctttaaagtttgacaatgtccgtttccatgacaggcctcaaataacactgactattacaaacagaaataaccaaccaataatcatgtataagtggatagtactttgcagaaaaaaagattcacaaataacgatgtatccagttttaccgaagtacaccaaactgtatcccaacgaaccattcaatttaacaattgattgccatccaaaattttacggcaaatcaaaagaacacgtgataatatcattcaaaggctttaaagttgaaagattagttgaaataaatgttttaagtgagcttacttctagtgaagattctagaagtacttttaaaagaaataataacaatgacacaaggaccgcattcaaaagaggagaaactaattacgtacctggcgtacgactggctaagaatcctaactttagaactgtaagaatgggacaatataacataccagagaaagttgagtctgctattttgggcgacaatgagagattggcccggagagatattttacaaagaattgaatacagttttccttgtctcattcaaaatttgaatgtttcaaactatgtagataaatggcatacattattgtacatggaagaaattaaagcaacaattaatgtaagaagtttcaacatgccatctacgtttttacttaaaaatcaagaatatctaagccttgaaattaaaaagttggctgaaaggaggccctctctaatcgttggtgacagagttatagttactgatatgtgggatgagaattcttatacttatgaaggttttattcatgttattcgaggtgatcaagtactgtttaagtttaaccctagatttcatgaatcttacagaggaagtgatgtttctgtagaattttgtcttagcagagcttcatacagaaaattacaccacgctatcagtaaggcactctcaacactgggaacagatgtcttgtttccctctcgcctaatatcgcgcccacctcaattacctttagaaaaaattaacaatttgaaatggttcaatccaaacttgaactatcatcaaaaaaaggccataaggaacatcctaattggagaatgtcgtccaatgccctattgcatatatggcccaccaggtactggtaaaaccgtcactgttgtggaaactctattacagataataacgcttatacccgacagcagaattttagttgcaacaccatcaaatagcgctgcaaatttaatcaccgaaagactcttacaatatagaaaactgttttcaagttcgatcatcagactaattgctaactatatgatagattctgaaaacattccagatgtagtcaaaccgtactgtgcagttttaaacatagctagagaaaaaacgtccatgtcacatcatgctattgttgaaaacggcattaatatgaatgtaccgtcgtcctatgtggggcgatatcgagttactattgggacatgcaattgtctcgggacgcttgccttaatggaattacataaaggacattacactcatgtaataattgacgaggcaggacaagctatagaacccgaaattatgatccccatgactttcataaacaaagaaagtggacagattattctgtctggtgacccaatgcaacttgggccaattgtgttgtccgactattgtaaagaatacggtatggataaatcgtatttatctagattgcttgaaacattcccttatcaaaaggactttgcagccttcgaaaatggatttaatgaaaagttggtgactcgattgacagaaaattatagatctttgcaggaagttataaaattacccagtgaaatgttttatgatgcatccttagtgtctagagttgaccggaatgctccgttcgtcacgagaatcatcgatgttatgtcagaaatatttgatatgcctgaagattctaaaactggaggagtgtttgtgcatggcgttaaaggaaacaatgcacgagccgcggacagtccttcctggtataatcctgaagaagcttctacgatcgcaatgattgtttgtaaactgtataagagtaatatatcaccagatgaaataggaattattgcaccttatgtagctcagataagacatctacggcgcttatttgagcatatgcatttggatcgtcctaaaatcggcaccgttgaagagttccaaggtcaagaaaggtctcttgtaataatatctacagtaaggtcatccagtcaccttattgaagacgatcttcaacactcattgggatttgttgagaatccaaaaaggttaaatgttgcactaacgcgagcacaagtagcagtgatgttgatttgcgatccccatttgttgtcacatgatccaaaatggaacaaaatcataactcacgccattaatgagaataaatacatggggtgtgacttctccggttgtaacgagacaaaagaattacaagaatacttcgaagaatgggatgaatgaattttttacatttactatctgagagaagcatgactatatttttttaaataatagaatatttactcgcctcggattcgtgtgtagattgcatatatcaatgtagatttagattttcactgcagtttttactcccatttttacaggatctgctgtttatcctcaatttaattaaaataatagatcgataagaataaaccgctacgtagtcatggtgtatattcacaaagggttatatgatgagtagccttacccagatgcaattcattttaatgactggttagggtggtctcatcttgcaataagcttttattaaatggttttatttaagttgcccaatttgtttggggtgaggttagtaatagggtaatttcctcaattttatctttctgatagattatatcagaatataagacacgtattttttt

SEQ ID NO: 110 - DNA, 3524 bp, Spodoptera frugiperda
aaagagaagaaattataaacaaacctaacctcaactaaaataaatgttaaaaatgtatctggtttagttcgttatttcatctgttctttgtttaaaaatagcgattatgggtaattatatttcatctttattgcccaataatgcagagaatgatttatctttggaagaggcctacaacatattacaaacgaatgaagaagggaaacaaaaagatgttgaaaacaaacccagttgtgataccatacaaaacaaagtttctgcaaagactggtgtagttactgagataagaaaagacagttttgttatagatgatatatatgtatgttctaacaagaattcaaatcttgaaataggcacaaaagtaaagtttaactgttttacttatgataatattaccaaagcaactaatgtagaaatttttaatgaatgggcagcagaagagttagattcattatggtatgatcggataataatatgccaaatcgaacaaagagttggtcgtcaacttcatctaacgggttctgagattattcttgatttagacaaagttcagttagaattcctaccagttgtaggtgattggcttgaactagacgtaaaatgtaaagctaatgaaaaagcatttgatttagctggtgaggtattagaaattaataagatatcacctgttagactacaccttctctcaggaaaaatatctatgtggaacaagactaaagagacaggaaccatagataataaaatattttttaatcagttatcattgtccttaggttacttaccagcaataggcgatatagttgtggctcaggttatcgaaagtgctcaaatggggcattcttggagagccataaaagttcttcctgatagtgttacacaaaaaaaagaacatgtgtccagtatatcacctgatatttcacaatatacagaacactatccaggattagaaatacaagatgtgatcctctattctgataagttgggagagactcaaaaatttaacataagtataactaacaatggtgagaatgatttgacattatttagtgctaaatttttaggagaacattcacaatgtggtataacagataatgtagaaaacgttactttacatcctggcaatatgcataatattttatgtgaatgtagttcaaaaagtattggagaagccaaagaatctattattttaaatttcggtggttttgttctatgcaaaagtataaatattttagtttcaatacaagacaacaatcaaagaacaaaatatacgaaacaaactaggggtataaaaccatttataaaacctcagggtcaagttattagaggacacggtaaaggtgtacgttttgcaattgcaagtctacctcattatactgtaccccaaaaattacttgatgtcgtaacatcaaatttttctgataatattgataaacagattcaggagatacagtctattaaaccatctcttacatctaatttaacacctacaaattatgaagataagttccacactcttctttatttagatgaaatttccatgttaatttctataagaaagtatgatcaggaaaacgcttgttttataaagaacggagagtaccttatgcttgaaattgataatctatcagaacaaagaccttctcttgcaataggagacaaaattagagctacagatccaagtaatagtaaaggtgttgtttttgagggaaatatacataaaattagtgctagccatgtattcctcaaattcagccctttattccatgataagtataatggagaagactattcaattactgcagaacctagtagagctctgtttaagaaattacatcatgctgcttgcctagcaataagaaatctaggaccagagctgctattcccaaataaaattatagaaaaagatcgtcaaatagattttattgaaaaagatgagtcattatcccccaatggtaaaaaaccaaacagaatgacttttatcttatccaaaatgaaagaatacaaagagaatgatagtttgaacatttctgacaatgaaaacataagagaaggagttactttggaatggtttaataagaatttaaatgacacccagaaaaatgctgtaatgcaggttctttggggtactgctagacctcttccatatattatttttggacctccaggtactggaaaaacaattactcttgttgaaacaattttacagttaacacgattaattccttcatctagattattagtaactgcaccatccaatagtgcagcaaatttaatagctctgagacttattgattcaggagtacttttaccaggagatcttgttagattaatttcatataattatgctttaaaagaaactattcctgataagttattaccctattgtgccactgcaggcttggctagagaagatactgttgtttcagaagtaaataacccaaatggaatacaatttggtagcaatatgtctactttaggccgaagtagaataactgttgcaacctgtagttgtgcaggaacgtttttccagttgagcattcccagaggtcattttactcatatagttgttgacgaagcagcacaagctggagaacctcatgttatgattcctttatcttttgtaaataaaaattctggccaaattatattagcaggtgatcctatgcagctagggcctgttatattatctaaagttgctaccgaatgtggactagcagagtcttatttggaacgaattatgagcagatttccatattgtcgtgatccagaaggatttccagaaacgtctggatttgatccaagatttgtaacgaaattattatataattacagagcccttccggacattcttactttgtacagtacactcttttatcataatgagttgataccgactattgacgatgaaactagcaatgaagcaaaactgctaacttctcttcaagatttcttaccagtcaaacgtgataagctaacccgaatactatttcatggagtaattggtgaaaactatcaaacagcagattctccatcttggtataatccccaggaagtagcccaagtgttttattatgttaatcagttttacaggcttggagtaaaatctggtggtataggtattgtcaccccttatattaaacaggctaaagaattacgaacagttttcacggaagcagaatttgaagtaccaaaaatcgggactatagaagaatttcaaggtcaagaattcgacatcgtcattatatccacggtacgttcatctaaagattttatcaaatcggatcttacttaccacttgggcttcgttgcacaccccaaaagattgaacgttgcgatttcgagagccaaatcacttttgctcatcgtaggaaatcctaagttgttgtgcaccgatccttgttggcgagctgttgttaaatattgtatcgaaaatggtgtttacaaaggatgtgattttgaataaatattattgttttgtattgcttgttataagaaataaactttatatttttttattttaaaaa

SEQ ID NO: 111 - DNA, 8997 bp, Spodoptera frugiperda
ttggaatgccgtatggtattgtcctcttaccaatttgtttttactttgataaattggcaacactaaaagtcaaatacctgtacgccatattgaaagttctaagtgggaagtcggtcaaacgctgaccctattagttatttctatttattgtgtgacgatattaatttaaaaacttattctaaaattttcttacgtatttagtgaactatttgttgtgatccaaattgaaacaagtgcgtttatacaatttgcaattcgcctaatgaatacgtcacagcgccatgttgtattcctgcgctgattgcaggcacgagaaatctgccaacccgtttattttccgggattagttcccgagaataaatcgaactgcgattttgtactcaaatatattttaatttatatttgttggcaaatgtcaaacaactttagtggaatagatgcatccctgtcatcgcattttaagtgctaattcctaaatctactgcatttttgtgcatccgcgaaagttgaaaggactgtgttgtaaaagaaagaagtgacaattagccaaaattccggtccctacgcgcagacgagaaggtgcctacccgccggggcagtcaggcgaaggagaaatgaacagtaacaagcgtaaaaaccgccaagggccgccgaggtcaccacgagggcgcgtggtgccagaaggcgtgtacaataacgcgcacttcatgcacgcagcgacgtcgcacgtcggcgacatcgtgcaggtgctcacccaatcaggaagcctctgggaaggcgtcttcaaaacatttagcgctcaatttgaggttgtattagaagtggctcaccgcgtggatcaagagggcgtggtggcggttgactcagtagttgagaagctcattttcaaaccccaggatgtggtgtccattagggctaaggattccgaccttgaatacgccacgcatgacgttttccagacagatagtgctatatctagcaagtttaatggtgtcgccgcaggtaacggcagaactggtgaagaacgatacttggagccttgggacggctgcgatacagaagtaggcgaggctccacagctgaacggagacgctctcctcgaggacctggagctggaccatcgcgccaacggctgggacgccaacgacatgttccggaagaacgaggaggtctacggagtgcacagcacgtatgatcactctctagctgggtacacactgccgctgcagcggaaggatactcaggattatagggacgcggaagcaaaggcagaagaaatagcggcggagattgagaacgccgcctcatcgaaggctcgcatcgagctggagaacggagacgaggaggagaggttcgcggccgtcgtgcggccacaggacggggcctccagcgccggcaaatacgtcattcctaacaggaggaagaatatgcagactggcaagctagtaaaacccacaactacaaacaacggtggctccccgccgatgggcgcggtacgggcgggcccgggcgccgggccgggggccgcgccgccgccgcccggccccgccgccgccaaggacaaggacacacgcgcgcccaggccacatctcaccccgcccgccgaccgccggcaggacgatacgcctctgagcgtccccaacagtgcaggcggcaagagttacgcggcgcaggcggcgcagggaccttaccatgtaccgccgttcccacacgcaccgcaccagcctccaaacaacgcaaacaaagtgaacggcgagccgcgaccgccgcacccgaggcaggggttcccaccacaccaccaccacaacccagtgggtggcggcgaggcccacgggcgccctccacgacacgagccccggcatgagccccgccacgagccccggcacgagccccgacggcccgaagagggcgtgcaggagctgcgcaagttctcgcaggacttcaagctgatgcccacgccgcagcccctgccgccgctaccgcagcacccacagccgcaaccacccatcaatgctcaaccacccagccagcccccgccggcgccgagtccccccgaggtgtcggccaacgcctgcgcggcgcccgaccacaagcgggagcgaccgcccaagcaacacacgccgccggaactacacaagcagagtactccagcgccaaagggcgagtcgccttcggttcaggaggagcgctcggctccgtctgcttcgccaccatcttcggcatccccggggatggatcgcgtggtcgccatcaagaagtctaccctcaacccgaacgcgaaggagttcaacccggctgcgaaaccgttcacgcctagaagtcccagtactccgaatccaagccgtccccacacgccaggcacgccatcaggcgtaggcgtcggtgtcggggtcggcgtgggtggcgtgggcgtgaacctgggcggcgtgagcgtgatgggcccgggcgtgagctacgtgccgacgccggtgccgccgccggccatgcagtgctacccgcaggtggcggccgtgccctacgccatgatggcggccgccgccgccgccgcgcagcaacccccagcgtacctgccgcacccgcaccccgctatggagatggggtgcgattgccggcagtacgcgccgcccatattcatggtgcccgacaaacgggaccgccctgacgcgttggcatatggcgcgatgagtggcggtggcggagtcgccggtgtcacaggcggaggcggacagcctcccatgcagacgcaacaacccaggaatttccgtaaaggttccggcatgcaagtagcggcggcgacgggccagccgctgatggcgccggcgcccatgcagcagttcgtgccctacccgcacccgcaccccgcgccgcaccccgcgcagtccgcgctgcaatacccgcacatggtgcggatgtaccacagcggcgtgggaggctcagtaggcgccgtgtcgggcgtgggcggcgtgggcgccgggggcgcgctgggcggtggagaagtgggcggagtgggcggcggccaggtgggctacgcgcccccgcccgcgccgtcgcccgcggccgcgtcgcccgcgctgtacccgccgccgtcgcccgcgcacacgccgcacccgcacccccaccagcacccacacccgcaccaccatttccaacaaccgccgtttcaggcgtatcaccaggtgctatgtcccttgatgggcccgggggggtcaggcggccaccaccaccaccaccatcacctcgcgtacttgaaccatgcgccccccaccgcctcgccgccacagccacacccacactcaatccagggcgtgctcctgccgccgagccacgggtcgggcggcggcgcgggcggcgggtcgacgacgccgggcgtggggtcgggcggcagccacgggtaacgggcggcgacgggcgtggtgctggcggcgcggctcacgcgcctgacgcggctcacgcgcctcacgcggctcacgctgcgcctgcagccccgccccgaccgccccgcctgatccgcctgactccgccagactccgcctgactccgcctcgctcgccccgacagcgtcgtttccttgcctctacttcatattatcgcgagtgtaataccgactatcggatttacgtgtaaatattcgacctaagctattcgtcgtcatcgttaaatttaatttgtatccgatgtgtaacatcacagtgttgcgatatacggaaggtgttccctcaccacctggtgacagtgtgcactagacacagcctggaggtctcgtcgtgaaagtattgctggacggtagtttcctcattttgctgctggcagcatcacatattttttgcggttttgtagaaaaacaacatttcgcagtagcgaaatgcattttaaattatttataaataaaaaataaatctgacctaaatcaacttttttactgcaacaaattggaattttaaaatttataaaagtgcacttgcaaagcttttttgatgtaatatttgtaacatatgtccgtagagacttatttgtgaagggagcggagcgcgtgaaacctccggtataaaggtttcattaaacaagcgccccatccctactgtatgtactgttacacttagtaaacagaacgtttttaatattgtttatatcaaaattagcacgtagactaggaggccttcattttttaatcgagtgtcatagtttgtcacggaatgacagcagaatacttttagcgccatcaataatatttggcgatattcaagtattgcttgtactcgtggcgagtgtatcgtggtcctacgatcagctggcgagtcccactggtggtaaggaaacgcgcgtaatgtgtattttctaactttaatacaacgtaaagtaataacttgtatgccttcttcgtatcgatacgtttatcgcaataattgatgtttaattatctttcgtaaatttttactcggtattttcacgtggcaacatattttcggtctctcttcatttgttgctataacaagcgacatttctctagttatactaaaatacggaattttgtataaaatatcgatagtttaccctcacacgtaatgtaaatgaaagttgaacattgtgatataaaccaaagatatgtacacatcttaaataacatagtttccaacttgaaacgaataacgattgcaaataactgttaagagattggttcaatttttgtataaaacgtaacattgtcacgtgaaaacccgatattgtgagttaacttcgaaataatatgaatgctggcaacactttcaaagcagttgaaggtgttgccattcacatgaaactgttatatatattttagttagttttagcatggcggggaaatacaaatgatgttggatggtgtatgtttgttgatatgttgtaagtgtagatagatcgtcttgtacggacggagtgagggtcggcggcggccctgtgtattataataaactagataattcactctctatcatatttaccgacgggaaacaagagggatctgacgaaactatcctctttatatatctatcgcgacacctcgcctgggtgcaagtcagttttatataaaaaaagtatatgaaatatatcgaactaaatatcataataaagtttgatacaacttagctgtaacgtattcatagagttttatatttaatatataataatatgtgaaggcaagaatatcgtttatctagtaacgcggtcgggtctctcctgcggccggtcggtaacgttagttccctcgttgacgactatcgccattctgagacagcggtcagttcgttatgtatttatttaggtttagtgttattgtgaaggtaccctccgcgattacataactaattccaaagtgtcaattgcactttaaatattattaatttataaattggcaaatagttttaaatttcttaatgtgaacggcgggcggtgttgcacgcgcccgtcgatttggtactgtaacgactttcattggacagttgaaagtgagaataagtgtcgggaccatcctagatgctcaatgtttactaaggtatgaatttactgtctcacgagtcattagttctattttattttatacatttgcagcttttgagaaggcaacgtaagtactgtgtagctgggccgcgatacgcggccgactccctgagagtgctcatccccagactatggttataaaagaatcaattgttcgttaaaacattttctattagcatatttaatatgaacgtagtaactacgcctcttcagattgcacgtgttagtgaaactcagctcctttattgtagtgtcgtgaacaaactctcattagtctgtggattccatccctgtagaggtcacggggtggattgctaaacaattctctcacaaatcacattgtagatacatttaatttgccacataataaggccagtctgtaaattcgccaagagttgtaagaaactcattgttttcattaattagtcccctttgttcaagcgtgacggatacattgtgcgaatccaaacgttcttgtatacacaagcttctttatacacacccttcagttgaaccgccagcaactcggtgcgcgaggatgaatgagatggactaaacatataatttaaacagaatctacatatttttcttatgtaaaatttgtataatagtattatataacattacaataacaaatatattataattttgaactgaatagtttactgtaatgaaggtatttttgaaagcctaccaaccatccgatcgttgtgaatatcattatactagtgatgttatgaaccgccgcagtatccgggctttcaatcatatatcactgtcacacgtagtgtttcaaggaattgtaataggatgcgttacagacgcaagtaggtttgacaataaaaatataaaactttgataggtaggtgtaaggatgttaggattgcatatacatacatatatacgacgaacctgacactgttcacatagattaacgtcagaattgtcacgtatgtacttgtcataatatgtatcatactctgttatatcagtaagggtcacaagatttgcacaatcagtacgtttcctcccatagttgtagagttatttatcgataagtttctgcttgaatggagggtcgttatacgcttactaagtgtggcatcaaggggagctaagtccatgacctccgcgcggtgctccctgggtagcgccaaatgtggacgatgacattcacattcttttataacaaattgatcaacggaaaccatggagtgctgcaggattactttcatacacaaattcgagttcttcctattcttatgtataagcattccttttgtaaaaattatagacaaaccaactgtatgtatcactcccaatgagttgctctgtttctatgtacaccgcgttaaatgatttgtagatttaacatagacatatttatatgaacagacaatgaatataacgtgtatatagtgtaaatatattgatatagaggggttactagtgacctttcccacaaactttacattcgtatttattttgtgatgtataaaggtttttcgaacatgttaacttgaaaaaaaatcacaaaaaaaatgttttcgggaaaggcctacatgatccgtaccacgttcgtgactgtagaatgtaacatatttcttgagaacatggtatggactctcgtctactgttttattttactttttttttcacaattttttttcttgttttaatttaaatttttatcgcgtgagtgaatccaccgcgtaagtttgttgctaaatgagagattgataattaataaaaaagatgtatgtgcgtgtgttgattgttgtgcgccatataaatattatcgatatattttttgtgtggagtgccacgcctggtggcacagacatgtttatgtttagctaggaatataccttttcttattttctcgtgaaatttgtacgtgcttacgaaaagacgttcgagttcctttggccacataatattataatggttgtggtgtaaatttttataagattctcatgttaagagcaacgatattccaagcgccgatggtaacgcacatttatctaaaactattgatttcaataaatggtaaaaggaatggacaaatcagagatctgattgtaaatcgccatccttaatatatgtatgtaattaaaataaaacgatcaagccgtaaggcgggcgtaatgtcgttgaatctaggataaaggagtaactccattgtgcctttatcaatggtgacatgtgactatcacgacttgtgtctactgaactgtgacgtatcaaagtaaacggtactgatatttatatactgagtgaatagaagttgtttagacaacaccaggtcacattcctaagtcagttgaatcaaatcggcacatacattacattccactaatatgccatatctacttatggagttacacgtttaattccccaacatagtgttcacagttctaataatactaatacacagattagtctattattacgatacaacttcgcgtcctttgctgtctgacgtcgcgggtctgaacaactcctatttactaatgttgctttggagcaagtggcaatgatactgacgtacttttgttaatttcgcgtaaaattgactttggttggatattccctgctcggaggctgctagccgaggccgctcggcaccaacgattgccacttgacaactagcacggctgactctttaaattatcacttcaacagtgataatttaaaagccagtccattacgagagcagctcatacatttttacctcgtataaggcactttcctttgtgtaaatatttgttaccgactcaatgtcggcgctgctgattcgtaaaaccattgtatgtatagataaattctatgaaattgccttataaatgtgtgtgttggcccccaatggggggatattgtgaggatgttaccaacgtgtatggacctactacttggaagttacgaaatgctaatttaattatctattgcagatatttccgaacgccgcgttcatattgtgggtagcattttggtaacatttcagtataggaggtgtaaattatgtaaagactgaagggaaataatgtgtgcggaagggagcagacatattgtaaagtaaattggtttttatgggagtgttaacaaagcctaaaactcctcgtattgtatattgtaatttgtttgatgcggatcggtagaatttgacgcttacacatgattatttggaagctttcgagctacgtaaagaaatgaacttgattaccagctagagttgtactgattcatgtcaaattcgatattgtatattgctgcttaattccgcttgttgatgaaagatttgatttgtgaaaaagtgctttttatttgtgagccccgcgaagggcgtgtgagcaggaatgtgccaaagtggtatggcatcgtttattgtttgttggacacgctaacacctgtgtcaacgaatatttttcaataaaaaagttaaaaaaatgtgtttcaaacacaaca

SEQ ID NO: 112 - DNA, 3120 bp, Spodoptera frugiperda
agtgtacggaacggtttgaaaatggcgatttagaatttattcgttcttgtcattttgctgtgatgcttgctcgctgtataaaaacttgtattttgttgctataaaatggctgacaccggactgcgtatgaatttcgctgccctaaagcgggcagatccctacgctagagaaataatcgacagtgctacccacgttgcgctttatacattcgaagagaacgaatgggagaaaactaacatcgagggtgctttgtttgtgtacagtagaaatggtgaaccataccatagtttagtgattatgaacagattgagtacgaataacctaatcgaaccagtgtcgaaaggaatagaattacaattgaaggagccgttcctattgtatcgcaatgccaagtgtcgtatttacggcatatggttttacgataaagacgagtgcgttagagttgctactaaactaaattctttgataaaggagtcgctgaaaccagtacctggtgagaacatgccacagaatccagtttatggtacatcaacgcctgcagctgcgccggtggacatatttagcatgttgagtaaggcccaggatgattttaactcgaataagggtttagcagctaacaaaagtgattcaacgccgtctcgcgcgcctgatatgacatcgcaaagtgttatggatttctttgcgaaggctggaagtggtgctgctgcggcgcagatgccggcggtgtcgtcgttaccttcgccgggcattttcgggccgcgtccgaccgacgcgcgagaggtgccccagttgctgcagaggctcatgagtaatccggcacactcagtggaacatatagagaaacaacaacgctctgtgacaccgcaagaggcccaaagttctaatggcaacatgagcatggattcatcaattagacaaaattgtgggttcccgttaaagtccactcctatcgacaaaccaaatcaacaaaggatatctggaatgaagaaggggcagatggattcaactgacaccaatggtattataccactggagagcgagttgaatttaatgcatatatcatcacccaagcctacgtctccgctagctacttacctgaatcaatcacaggacatcagccacacggtaagctcttttaatggtagcaaattggaagagattggaatgtatcctatgattgactctgtgccaactcagcagaaaccggcgttgatgccgcctacgatgttcactgcaagcactggtggagatgtccagccctcgcctgagcccctcactaggaaccaacttcttcaagctttcaattatctgctgaaacatgatgctgattttgtgaacaaattgcacgaggcttatgtaaaatccttttcagaaaaggcattctctgtgtcataaaattcattctttgacagtggctagcaccgactgtgtgcatgcacttcaaatataaaatgtacagccgtaatttgaatataaactgaaacagtataaactgaatcttcttaaaaatgttgtgtagaccctctagttttgtagtgactcattgtttggagtatttttaaataagttttaaacctttgactgtaacctgtacagagaatgaattttagtgactaatctgttagtttggacagaggttgagaaggtcccttaagccgctatttgtgatatttaaattggctccagcttaaggttattctaaatctatcaatacatctgaacaactgaaccttctttgttagttttaataactaggagttctttgcaatattaaaatatgtacatttttgaaagacaatactatgagtactttgacaaatacgcttttctaagagatatttttattgacttgatatgctgcattgatacttccataattttgaaagaaaatatcttcttttattgttaaggactgcaagaatttgctatatctttacaagaattattcttacctgttaaacagcataggcatcagattttttaggttttattgtatgttaaatgtttttatttcctgtaaaattttgtcagtagctactagtaagatttgtctctattcttttatatctattttttcagtaaaattttagtatatgtattgaatgttatacaaaacagaagactttactatacattagatacaggggaaatcaaatgataaaattggttgaaaatattttctttaaacatgtaaaatttagtcatttgtttaggggaaaaaaataatttaataagttatatttctcctaagaatcaactttctaaggaaggtgtgttgtaccatacacactgagagatatataagttcaattaccaataatggagcttttggaaagcttccaaggggacctgccacctagccacccctttaataagtctacatttcaattgtgaaatgttttgtactttgccaaactataaaaatcaccttaaaatgtttatggtcgaattaaatcgccgaccacgtgtttgtaatcttaaaaaatgataagacaaaaaaatgttgtaactttaggaaacatctataaaatttgaaaccatctctgtgcttgtgcgtctaatgctatatgacgatgttataatctgttgtgtaaggaatttggagacagctacgactgttatatgaagatattttttattaattctcattactgtaagggagcagaatattttgacgaaaactaatttggcctacataactttgatcctttacctttgatcttaatttgattttggcctacatacctttgatcctgtacctataattagtttgattttataaatgctcctactattgtttcaatttcgtaaacgaatgtagtccaggcggtaatagtttttgacattttttcagttagaaatgttatcattaaaaaaatagtctcaaattaaagggttcatcgaagcaacaatttcttttatttttccttgcagacatccatttttcatgactttgtgatttatggtagttttctttcaagcattatttcagtaaattgaaagttgtccagtaacatctttattattatattagcttttgaggcttacagcatcctgtgatactttgtggctagtttttaacagctgcatctaatggattatattagatattcataggac

SEQ ID NO: 113 - DNA, 1579 bp, Spodoptera frugiperda
taatgagaatcctttatcgcatgctttagatgtgaactctcttgttatttaagctctggaacgtgagagttgttattttctgttttgctcatatcggcttttgttatctgtggattgattttacaatacaaaagaaaagcagtaaaataatctaaaattttccattgtttatttttttacttaaaatacggtaaaaatctttaaatatacaatattaagatgggttctacttctggtaacgcacatcaaggcgaacattctatacccatcgatattttggatgacctgtgcagccgttttataataaatctgccgccagaggaccgtggtaatctggtgcggatatgcttccaaacggagttggcgcactggttttatttagattattattgtacggatgaatccaacagactacatccctgtggtattagagagtttgcggcacacatttttcaacacgtcccgcaactccgagaacatgtgagtagtttggattcggtgctggaaaactggcgcgagtacaagcagaccgtgcccacgtacggcgccatcttgttggacacagacctcacgcacgtgctgctggtccagtcctactggaccaaggcctcttggggcttccctaaggggaaggtcaatgagagtgaggagccgtggaaatgtgctgctagggaggtccttgaagaaactggttttgatatcagtaaactaataaataagaatgattttatagaagctactattcacgaacaaattgtccgcctgtacattatagggtacattcctagagatacaaagttccagccgcgaacaagaaatgagattaaagcgtgtgagtggttcccgttggccgatttgccggccaacaagaaggatatgacgccgaagctgaagatgggcgtgagtccgaacgcgttcttcatggtgctaccgttcgtgaaacgtatgcggcgctgggtcgcagagaggaactccaaagtgttcacgaatactcgaaggacgcgccacaaatcaatgggagacttggagtctacctcggcaactaaagctaaaggaaagcaaatctcccaagggttgcagaatgagatacaagagtatcagcaactcaattctaattctgtgccgaaaccgtttaagaaccatggtaatcataacggtaatggtaatgggcatgggaataatgggaaccatggaaatattcataatcatggacatagccatgggaatgcgccgaaaaatactccaaatcaaaataattctaggaaagatagaaagatagctaagcgtcaattgtttacgccgcagaatactcacgcaagtcctaatgtaaacttctctccggtacaaaaagacaatagtccgcctatagtagcacctactaaccacgtcgaatctccggatgacagtgttttctttaacttcgtggctccgtcgtgggcaaacttcaagttcgacagacgagctatcctagaatgccttacctgagcgtaaggaggaacaagtctggttctaactcctatatcacattgacttcctacttccattttgacaatatttgtaattaaagtaattacaaagc

SEQ ID NO: 114 - DNA, 6528 bp, Spodoptera frugiperda
atgtgtagcgtcgtgatgatggacgcctgctgttcccgcttcacggcggcggagggcggcgcccggctggccgccgcagcctccaccaagaacatcctcgccgtggagtatgctagcttcatacccgtccggctactctatgaaaaggctcatcagatccgcggctctctcttcgaaggcagtaagcgctctatatacataacgagagcttcccgagtgcaagtggtagcgtttgagctgaagatactcacggacctcggtacggtggccgcgcagacttatgatgaggtttacgactggatggctgaactggaaactaaagaggtagtaatatgcacatcagcggtactgaaacggatactagaggaagagttattgtctatgagtaacatcaatgtacttattgtagacagttgccatctaatctacaaggatgaagatttgaaatatatcatgcgcacctacaaagaatgctcaaaaactgatcaaccgatcatcttagcccttacttacccactattcaactcgaaaaaagacactgaagacaagaaagagacagcagaacaaagcgagaaagagaaagagacatcagaacaaagcgagaaagagaaagaagacacaacttctataagcgagaaagagaaagaagacacaacttctctaagcgagaaagagaaagaaaacacagtttctctaagcgagaaagagaaagaaaacacagtttctttaagagagaaagagataacagacgattcgatgactccgtcttcggaaggagtgagtgagacggagcatagggtttttgaacgtgtgaaagggacagagatagaggagattggcgtttacaagaatttggatgattttgatatgtacgagaagcttgagtggaagattgaggaattggagaaagagttgtgctgccaaatggacctggctgaagatattgatggggggaaaagaatgtcagcgtcagtgagtaagcctcgggagttgatcatagagtacgatggcaagccgacggaggatcagctgcccgaagtataccgggacctcgacaactacatgcgggacaccgtgcaggatgctctggacttcatcgaggatcacaggcacgaccccactgaaatatacggcgatgagttgtacgatgagttcatgagcattccggaccccaccatagatcccaaaatggtgttcaagaagtttttgtacgttttggaacagctaggaccttatgcagcggacaaagcagctttctgcctcctaaacaaattagaaaaattaaaaatcaaaatcccatatgaaagacattttattctaatgtgtttatgtacaacagtgtttgttaaaatccgatgttatgccgaactagttttcaatacaatagaagatgaatggattagaatcaaaacgttttcgactccgaaaatattaagattcgtcgaaattttggagaaattcaaaccgcctgatgctaaaaattcgactggtatcaggcaggagtgtgatggtgttgctatcaaatcagactgtgatagcaaagatgatattaatcacgctaaaaataaagaaaataatgtcaagaaattattaaaagatatagaatcgatgcaaaggaataatgcagccagggcgttgcagatgcaacagaatcccgatgcgctatgcgggatcgtgtttatgaaggagcccctgattgccaagatcatgtttatggttattgtggacatgtctcgctgcaaccctagcctgagctacgtgtgtgttcagttctgtgccaccgagtccccggccgacccgggcaccgaaccccgggagtgtctccgccaggggaagcggcaggaagacgtgctgaagaagttccgtatgcacgaatgcaacctcctcctagcgacgtcagcgctggaggagggcatcgacctcccgcggtgtaacctcgtactgaggtgggatgtaccgccttcctaccgttcgtacggactgtgtcgcggtcgcgcccgcgccccgcgcgccgcggccggcctgctgtgtagcgacagtagcgatactactgacttgttgctgcaccatgtagctacatacagggaactcgatcagattataagccgcaaatgcggctgtggcattcaggacgaaccgccccaaactgaagaggatcacgcggacgcattcaccaccttcgtcaaaccatattcacccaacgacaacaaaaatacaaatacaaatacagaaaaaggacagaatgaagagtcttttgctagcgtggatctgagtacggctattgccttgatcaatagatactgcggcaagctaccatcagacacgttcacccgcctggcgccgcagtggtggatggaagaggtggctctcccggtacagggaaccgggcaggtccggccggcgtacatatgtaccctgcggctgccgctcaactgtcccgtcaaatataatatcgtgggtcacccgatgccgacgaaggtattagctcgccgcatggtggcgctgcaagcgtgcaggattctacacaagtccggcgagctagataaccagctgatgcctataggtaaagaaaacttcagagcggtggaattggaaggcgtgaacaatctcggtgcctgcacgggtaacgaacccgctgacgcccacgactccgcccgccccggcactacgaaacgaaggcagtattattataaacggacagcctgggcgttcacggactgccagccggttatagattctactgatgcagagatatacccgggtaaacgcaacatgctatacgctatagtttcaaagctatggtgtgccctgcccgagcgatacaacacccgaggcaggcgactccacgcgccgcaactagctagccaagctataggaatactcatggctagacaagaacccgacaatctccagatccccgcgttcccggtgtacacgcggtcgggcgaggtgcgggtctcggtggaacacgtgcccggcgctgatgtcagggtgtcgccgcgccgggggaaacttatacgcaggttcatgcgctttgtatttgccgaagtattgcgcgtcagacggcgcggcatgaaactacagagcgaggggtccacacataacaactactacatcgtacctactattaaaacggttacaccagacggtacacacaagatagacatcgactgggacttcctggagctgatctaccagcacacggaggagaagaaggccagcgacctggagaagccggtgctctggcaggagatgcctgatgatgacaagggggagacgtttgtgttcgacgcggagaagtacaaggaggcggtcgtcacgccctggtatagaaaccaggatcagcctcagttcttcctagtagcggagatatgttggaacctgactccggactcctcgttcccttcagccacccaccagagcttccgcgactactacagcaccaagtggggtataatatacccagactactacagcacgaagtacggagtgaccctcacgcagagagaccaacccctgctcgacgtcgaccatacttccgccaggctcaatctgcttacacctagatacgtgaaccgcaagggcgtagccctcccagtatcgtcagagcgcacccggcgcgccaagcgggaccggctggaccagaagcagatcctcgtgcccgagctctgccgcctgcaccccttcgccgcgccgctatggttcgctaccgtagcgctaccatgtgtgctatataggataaacgccctcctgatagccgacgagatacgccgcgctgtggcaatagacgtggggctgggtataccgaagatcaatgaccacacgatgcccggcttccagtggcccgcgctcgacttcggatggagtctggctgaggtactaagcgcagattcagagaaaaacgataaaaagaaggacgaagaggattcaaagaaagaaaaagaattaaaagatagtgaaagcagcagtgagaaagagaagacagaagcggactcgcagaagagcacagaagaagacacgggtctagaagacgacagtccgcccgctgagaagactatcaacgatatactgcaggagaaggaggatgctgaggctgatgcggcctttgaaataggcacgtggagcaacgacatggcgtcctcgatccccgagacctcggagtacgacgagctgatggagcctctccctcctaaccttaccttctgcacttctgcttctggcggtacgaactggtgcgatcccgtcagtaagccgaagtacaaccagtacggagcgtcgaagaacttctctatggcagacagcgatgattcttttatgtctagcgatctagattcagacgacacagacctggactacgagggtagcgatgaggatgcggacgccaatggattctgcagcagtaggaatgctaacacaacaatgggtgtccgcatagaatataaaacagcccacgaggctgaagccttcgacatagagcgtacgaagaaagtgaacccggcgccgatgcctgatgaggaagacgatgccagggacagggcgctacatgatgagctgatacggcaggggagcgcgcctgaagagtacatagaaaaattccgttcagcagtcacccaacacaaacaagacatcatagacaagaaccaactcattaccaaagatgacgacatcacagaaatcctaccagagacaaaagaaacataccacagctctattatctgtaaaaaaagtgagacacaagccatagacgaactcttcccttataccacagacgaactagagtttaaagatggccagatcacaatagaaagcatagagagaaataagagagtattgctagctcaattaaaggaaaaactaccaagctaccaattgaataagttaaattgtttctctatgaaagatattaatattgattctaaagattatgttaacgaaaaggttgttaatgtcggttttgatactaaagaggggtataaaggggtttgtaagggagtgggggagtttattccttattatacggatgggaggggtgggaaagagtttgattttgactttcaacccgtgttggagggacatccggggccgagtcctagtgttattctgcaggccctaacaatgtccaatgcgaacgacggtataaatctggaacggttagagacgatcggcgacagtttcctaaagttcgctataactgcgtatttgtactgcgcgcaccccaccgtgcatgaggggaaactcagtcatatgcggagtaagcaggtatcaaatctgaacctgtaccgtttgggtcgcaacaagcgcctgggcgcgcgtatgatcgcgtccaaattcgaaccgcatgacaactggctacctccttgtcataagccgccccctacactacatcctaggttgaatggcgagggtaaagacatgatgcagcatctggagacgccgttggacgccgccggttgtttcataccgtacaacttgatcacacagcatagtataccagacaaatcaatagcagactgtgtggaagccctaataggcgcctatctcctggagtgtggtccccgcggagccctgctcttcatgtcatggctcggcatcagggtcctgccgtgtcaccatgtcgagttggacgataaccacccgttcgtgagccgagctcagaaggtggagagagagaatcagccaatattcggtgagttgagggcgccaccgtcgcctttgctccggtacatagaagatcctgaaggggagttggaacaaatgctctcaggctacgacgccctggagcgcaccctgcagtaccggttccaggaccgctccctcctcctgcaggccctcacgcacgcctcccaccacagcaaccgactcaccgactgctaccagcgactcgagttcctgggagacgctatactagactacctaataacccggcacctatacgaggacccgcggcgccactcgccgggcgcgctcaccgacctccgctccgcgctcgtcaacaacaccatattcgctactctcgccgcccggcacggcttccataaatatttccggcacatgtcgcccggactgaacgaggtgttgacgaagtatgtgaagatacaggaggagaatggacactccattagtgaagaacattacttgatccaagaggatgctatggagcaagctgaggatgtggaggttcccaaagcgttgggcgacctgttcgagtccgtggctggagctattttcttagattcaggcatgtccctgggtgccgtgtggaaatcctacgtgaacctgatgggtgccgagctggaggcgttcagcgcggccgcgcccaagtcccccgtacgggagctactggaggccgagcctgataccgccaagtttggcaaaccagaacgtctggcggacggccgtcgcgtccgagtgtgtgtggaagtctttgggcgaggtactttcaaaggtgtcggcagaaactacaggatagccaagggaacagccgcacgatgcgccttaaggcatctcaaggtgcatagagctcgctaa

SEQ ID NO: 115 - DNA, 10811 bp, Spodoptera frugiperda
tttggacctgcattgtgttgtattgattattgatttgttatgaatgtactaattaattgtatttataaatatggaaatcggtttaatcaataacaaaatgaagagatttgtgtaatatatcggctaaaaataaaagcaatgtgcatatttcactaaaaacatttaaaaaacaattcaacaccgaacatgtcgctacctacaataaattatagtgtacctccgccacggttggacatgccaccgccagtggcaccagttccaataacaacgacgatgccgccgccgatgtatggccctccgccgacgttcatgccaccgcctgtgccatatgtggacaagctcacccagccggcgccatctccttcaccttcaactgcttacgcccctgtgacaacttatactccaattaatgtgcccccacctactgcggtctatcccatgatgccgatagatgtgcattcaccgccgccaccctactatgcaccaccatacgattattctggatacaactacagtcaaacaagacaaacaccatcatcttctaaagactggccagactctcactcctctagcatgagctctggaaaacctaaaccatcaggatcttattctgagaaggatgaaagatcccgaagagattctcatgatagactttctcgcagttcttcatccaggagacgctctcctggtcacgatagacactatgatcgagaacgtgatagagaaagagaaatgagacaccgtagtgaacgaagatacagccgcagtccaagtcgtcatagtcataccagctcaagcagtcatcgtaatcatgcttgtcgcagtccttcttactctagtcacagggaacgagaaaagtcttacagacaaagatttgatgaaaggcgagagtatgagcgaaaaagatgcgaatatgaaaggcggcacagtccatctcgtagcagagactacaggagtcatagtagagctcatgaacaacgaaaacttagatcaccaagtaggcaaagttgtagatcaccaagccgagaatctcgaatgcgtagccgcacccgtgaaatgtctcatgtatcacaacgaagtatgagacaagaacctaaaccattatcagatcgtgaaaaaattttggaagaatacaggaagaactactgcaagacttctgaagatttcatagagaaaatggaacagtggtctaaagaacaccagtcagatgaagatgagatatcaaagatgtggtttagaagttctcctgcagagttatactataaggcagtggaggatggttctggagtccagcaaactgctaagttggagaagatctgtgaaacattctaccagcagctgattgaaagggggcggaatgctagacctgaagtggatgaactgccacctctgagaccttctaaagttgctatgtgcaaacataaatctgaagatggaagttcttcatcggagagtgaagatgaatgtttggatgaagatggtctccaaggctacacggataggatcatgctggagctgcaaaggaaacagagtcaccctaggagactacatcctgagatgtggttcaataatactggggaaatgaatggtggtccgctgtgccgctgtagtgcgcgtgcacgacgttacggtatgcgacatggcgtctatgccagtgaggaggctttccccaagtgtataccgacgcagagcaacaatgacaggctgtaccattacaggataacagtatcaccaccaacaaacttcttgataaaatctccaactataatagctcacgacgagcacgagttcttattctccgggttttcgatgttctctcactataaactggcaaagttacctacttgcaaagtaataagattcaatatcgagtacactatcttgtatgtggaggaaccggcgccacagaactttactgtcaaagaattggacttgtttgaggaatttctattctacgagctgttggagttagtggacctggacttgggtaaagggactgataccacttgctcacagtttcatttcatgccgcggttcgtacgatatttaccagagggtggatgtgaggttttatcaatgtgtgaagtgctgaagtatttgattgacgagagtggtttactgatagcaccagacacattggaggaggtgcatagaatggaccattatacttggcaaaagtttgtggacagaatcaaaggtatgatagtaacgtacccaggcaagaaaccgtgttcagtccgtgtggatcagatagaccggagtccgccgaccacgtctgatgactcgtcaaataaaccttactacccagagatagtacattttggtattcggcccccacaactcagttatgccgggaacccagaataccaaaaggcatggcgttactatgtgaagtacagacacttgattgccaacatggcgaaaccttcgttcaaggagcgccagaagttggctgcgaaagaggccaaactgcaagagatgaggacccagagtaagatgaaacgcgatgtcactgtcgctatatcgtctgaagggtttcatactactggtcttatgtgtgatgttgttcagcacgcaatgttgatcccggtactagtaagacatctacgcttccacaaatccttggacagtctcgagaataagattggctacgtgttcaagcaaagagcgctgttacaaacggccctaactcatccatcgtacagggagaactttggaaccaacccggatcatgctaggaacagtttaaccaactgtggtatacggcaacctgagtatggtgatagaaggatacattatactaggaagaaaggtatcgtgaccctaataaacattatgtctcggttcggcaaacacagcgaaacggagtcggatatcaagcacaatgaacgactggagttcctgggtgacgcggtagtggagttcctgtcctccatacatttgttccgcatgttccccggcctggctgaaggaggactcgccacctacagagcttctattgtacagaaccagcatttagcgcagttggctaagaacatagagctggaacagtacatgctatacgctcacggctcggacttatgtcgcgaggtggtcatgcgacacgccatggcaaactgctttgaagctctcatgggcgcactcttcttagatgctgggattgatgtagcagatcgtgtattcgccctagcgctctggcacaaccagcccgacctgctggacgtgtggaccaaggacagggcacacccgctgcaggaacaggaaccgctcggcgaccgcaaatatatcaaggacttcgagttcctacagcgacttgtaaattttgagaattctatcggcgtccaattcaagcacatccgtttactagcgcgcgcattcacggaccggtccgtagggttcacgcatctgacgctcggctccaaccaacggctcgagttccttggcgacaccgtgctgcagctggtagtgtctgacagactgtaccgacacttccctgatcatcatgaagggcatctgtctttgctccgttcatctctggtgaacaaccgcacccagtcgatggtgtgcgacgacctggacatgtcctcgtacgcgatatacaacaaccccaaagccaaacccaccaccaagaaacacaaggctgatttacttgaagctttcctcggagccctttatattgataagaacctagactactgccaagcgttctgcaacgcgtgcttgttcccgcgcctgcaagagttcatcatgaaccaggattggaacgaccccaagtccaaactccagcagtgctgtctcactctgcggtctatggagggcggcgagcctgacatccctgtgtacaaggtgatcgagtgcctgggtccaaccaatactcgcgtttacaccgtaggcgtttacttcagaggacagaggctagctgcagcaaggggacactccatacaagaagctgagatgaatgctgctgagaaggcactcagctgtgctcatgaactattcccacaactggaccaccagaagagagtcatagcaaagagtctacgcaacaagaaaaagcgggcaaacggcaacaacagcccacaggacggggcagcggtgaacaacccgaaattcgacgataaagtaccaaaagcctacagactcgacactcagtacgaaagctcagaagaaagtaacccagcaatgtctgaagaagaaatcatgccagcagacaagtctaatgaagattctggccttgacagtgactcctcatttccccaagataaactggatcaggtccaagtaagcagtctactaagcgacatgcagaagattaaagaagacttgatcagacgcaatgaatatgaaaagttgaaggaaaaatgtcgacgatctgattctgatgatgactagtgagtttttataagctttaagtgtagatagtggcttttaattttttattttgatgatgatacttgacacagattagaaaagaaaatgaattatcaattttcatgaagaacattggatgtaacgattacatttattgaaagtaaacttgtaattatttggcttaccttagttctctttagttcgttataattgcttcaatcttaaacttattaatcagtagaaaatatgcttcgaaccgatataactttatgtagtagttcgtctattgaaaagcaaaaaatatgtgtaccacacatagatgatagatcagtacccttagtacgagttggctttacgttgaactaaaacaaaacaaaggcgctctgattggtcggcgcgaatgaaccaaccaattagtacacttagaagtttgctgtgattatggtttattcgagccgatcaataagttttcgttcaatggtataggtactgatagatgtttgttgtgtagacgaagctactcaacgttttcaagttgtatatgatcgtagagtgtaaattattcgtcaagcttacgactaaaaatattttgtcttttaaaatgtgtgatattgacatatgtatgcatgatactgggatttgtatgttcttatactgatgacaatcgtggaagtagtggaaatgaaaagagcttatgaataaaggtctgaatatctatacatataataaaatcgtagaaaagtgctgtctgtacattgaaaataaaaataaaaaaaatagcaggggttattgttatgtcgatgtcgaacccaaaaatgtaattaactttttttttgtctgtttgtctgtttgtctgtttgtctgtttgtctgtttgtctgtttgtctgttcgtctgtgcgcgctaatctcagaaacggctgatccgagttggatgcggttttcacgaatatattgtgggatgcttaaatttacatttagtgtttgtttcatgtcaatcggttcataaataaaaaagttatgtcaaattaaagaatcacgtcgaacattctatgcttataccattaatctccgcaactatttgacggatttggttgaaatttggtacagatatagtttagaaccttagaaaggacataggatagtttttatttgttttctatcgtttttattattagtatttgttgggtatcggccgagcgcttcggtactgttgtggaaatagtgtactataagtcgtatgattatttgtctgcagtggtcctgctgtttcgtatattctaaattggtttcgttgtatttgtctattaaaaagtttatttgttgggttttcctggttaagttatttaacgtaggtttagtttgatatcgattattagtagttaatgtagttagtttgtttaataaaattgtaagtctataatttataaattaattagattttaagtcgtttcttttaaattatttagtttaagcttggtttggcttggtattatagcattgaggataggttgtaatataatttcttttttaattgttataaattcgtaattcgtagctttctttaattctttagttttaagttagttttcatcttaagttcggaaagattataatatttctttagtttaagtccgtttttaaactattttttcaatgccctaagtgagtatacatctattaaattcaaacgcagagctcattatgttgatttttgaggagttccctagaatattttccacatctcatttttgaagagatcccgcgaaatcgggaactatgtggttaaaaccaaaaatttgccggaagtcactattccacacgaacgaagtcgcgggctatataaatctgtagaagggtcaattctgttcattgaaaatatagaaaaaataaatagcagggtgctactgggtcgataccaaacccaaatatgtgattattatttttttgtctgtctgtctatacaacgtgtaacaaaaagggggtatacatatcaattgcacagtttctagataacataacaaacgacacgggaagggttttttaaactcatgttatcatggtaccaagttatgaatttttcaaatcgcgccgacgcgcgcttcaaaattaggtagacaggtcctaggcgatcaaattgacagaagaaatgtttcgtaatattagcgagggatccctgcagtgttttgacacgtttgtatggtttgaaatcatatcgatatgcgatatcaagtatttggtacaaatttttttttaaacgtattttaagctgaaactttgtgtagagattctattcaacctgtattcatcagggcttcttgatgtatataggtattttgttacacgttgtatatgttcaggcatcacgtgaaaactaacggtttgatttcgatgaaacttggtataattaacttattatcctggacataaaataggttacttattatcctggaaaaatacgtagaaaaaaaactttatttttcagttttattctgctcaacagcagtagctcaatagagggatctccttaattattatgggccttgccgtatttgggtccaatagatatttataagatgtcattttcacagttactcaaaatggagaaataaaacttccacgcgaagaccgacatccgcgcggacggagtcgcgggcagaagctagttattcaataaaatccttgaccaatgaatcattcttcgaattaaatcgaaatcagttttgaatctatgttgcttacagacagacacacaaatgctcactgaataagctattacaaactttgtaatatacgtaataaggtccattataatattttcacacattaaaatgctaatatcacaagcgtaatagaacggcagaacacgttcaatatgttattctttgagaaaattattatttgtttaaactctatctcagaaaggacaaggtataatacccagcacgaacctcgtaagatttttcgtggggtaagttcaagcattatgtaattttattcatttaactacgaacataaaatcttttctttgtttcctttatttttctttcaagtacaagtcactttttaaactaaataatggctataaataaatatacaaattgcgagaacttatctccactaaaaaaaatctcgtaattagttcgtgctgaggattatactatattgaaagaagctaattatttgttctattccgagcatttaatcagtagaactttatatgtttaaaatgaatgtgatggaattttgagatacggcatgaaatgctagatgaagcagactggtcacttttaaagaaatgtgtaagtaggtttaagcaactcatgtatgtgttttagatcgataagtttaattgtctaatagtccggtcaaaataaacactttaactaataaaaatcgtacaggctttgggtacaaccaatacaaataagatactaaaggattgtggcaagaattcgtcaaaatgtttagcacactctgtatcaatggcaacttttgtaacatagagcatactattggtaatagtgtagccaatatttttttttatttatttaatctttagttttacaacgcatttgaccggactgttagtaggttttcatatattaatcaaaaatcaatttaattaaagtagttaggcaggagtattttacgtaaaaagtcaccggttcgtaccatttttgttttttttattctatcaaaatggattcctttttatttgttgatttcaattaatttcgattacgaacaatacaaggtattcattatgttttgtttgtaaattatagttcgaaggatattgttgcaagacgaggttaattatattttaggggctggaatatgtaaagtttgacttcataataaggttaacattcggatcagattgatacccacccgccgtactgcgcgatgcaacaatatcagacaaactataacacttttagaaaataaatttagtattatttagttctatgatctatttgtgtgatacatattttttggttctattgtttctaaaatttaaataagagtttgaagttggtttaatgttaccactcatcaacttgtacgacagcattacactttggatttttggtgcttttaaaatattttgaacgtagggtaatatttgttaaccttttgaacgccagagcaaaaacgcatgaacttgccctaacgccaggccacaaattcaccgcaaatacctacgaaaaaaatagggattccaaaacttcatcgataatcaattttattttcattttcgtcagggtcacaaatacgtgacaagcgaaaactgtccctgagcgccaacgacacaaatatgtgacaaaaacacgaaataaactatttaaccaggtaccgaaatttaaatgaaacttaaataattaagcagtaggtaacatagcataattattaagagaatgacattataaatctatatacctaccaaagttgtgcactaagtatatacctaattatttaaactcgtcatattaaaatgagtcgtctttatatgagtacatataaacttacatcatacctacttgtatctatatatttaccctagactgtactcgtacttactattaaaacatctgacattaaattagaattaacttactcgccatttttgcaattataatgtaggtactcgataaaatactttctgcaacttccccgcatttaaaaacacggcatgcgcttacgacgtcacgagtccgacatctatacatgtcaatggcgcagaagggattgcatatcggtagtatgctagggatgcgcatgattggcgaaaaggggatgtcgataatattgaaaatatagtaaactagcggacccgacagacgttgtcctgtctacacgtctttaatttgaacatttgtcggatccaatgtaaaacattccaaaatcaacaactactaataaattaaaaactaattaaaaaaaacattgtccagcggacaaaattgtgaatgtaaaccattctcagatccccttgaacacacacaaaaaaatcatcaaaatcaatccagtcgtttaagagaagttcagtgacatacacacgtacagaagaattatatatataaagatatgctattatacccaagaatttttcagtttaaaatatagtatatttaccttttttctcagagactaaggttatatatatatactttttaatagttattacaaaaaataagcgagtcatttagctgaagttttaatattacttgaattacactacatcactagtaggcatgtatacatgccattggcgcgagagaacatgcttttttagccgatatttgtttttatcaatcaaatattataataactatattgcaattttgttcactgtgtacaattatgtaataactgggtattcagttcttaagatacatcaataaaacacgtgaaagtaatgatttaatgtgtttattttgtttttctctgtgatctgtttcttggcatctatagatgtcggtggcgcacagggcacgcttgcgcatgacatctattcatgccattggcgttcaaaaggttaaaaggcttttaggttaaataatatgtatttaatttggattggtacaagtcagcgttagacaagattcttgtttgggactttagttgaattttcgctcaatattacatagtttatagtgatcgtagctagtctcaaaacataaacgaggtgatgtaacgagttgatgagtgatgcttccatgaagcaggtacaaagagtagatgcagtaatgtaattgtgcactgtgacacatataaccgccctgcccaatgatattctaggtgtagataggttataagtgctcagaaagtgacttattaaaatgtggacaattggcacgtttttatagtatgggaccgctagatggaaaataaaggggtgcggtttgtaacgccccgcgctccccgtaatgtcacgcattatattaaaggaaaatgcagttatgacatctctttgtatttgcttcatggatgaaccttagcggtatgatattcagtgcattagaaacgtgtaccaataaaattcagtcaataattttctagagctttttagtcacttgtaactatttatatcgatacgaaatacaatgaattactgtatgtctgtctattgtaatagccatttcatgtatttagaatcatttatagccattttcagtaacccatctgtcgactaatttggctatttgaaaataacttatcttttggatataattcaaaaatgtatgtcaagacatatatgcaaacggggctttttttggatagatgtagtagtctttattaaaacgaggtttttaagcaaacattcttgaaaatgtgtcaaaatttctctctgttagccaaaactgatagataggttattaaaactggtctttggttataagatcatcatgtaaattgggaataaagaataaaaaac

SEQ ID NO: 116 - DNA, 11747 bp, Spodoptera frugiperda
agcaagtgtcaaaaaagtgatatcgccgtgtgcggacggctgtttattaatgtttaataaaattatgaaaataaactaaacatttccaatcatacatctgttacgttaaaattctcattataaagccttgaaatggtgtgaatagtgttttgtatctgtgaaggggaacgagataaacgtgcaaaatggcaaaggagatgatgatagtgtttgtctatgacactctgtgctgcacttcagaggaggatgaccctattgatgcagtgctgtacttccatcctggatgggtgtctgatacccagaggcatgcactagcaggacaggtcgtgggcgccgcacactgcgtaaagacgctgttctcccagcctatcgccatcaccctgcagagcggtaaattcatcatcagggaatatgggaggtacatattggcaattggcagtgacagaaacatcccagactgggtgctcaaaaaccgtgcgaatctgcttacctccatgatcaaagtataccacggagacctgcaagtcctggctgaacagatggaagaccagcgccgactgtcggagaagctgtaccaggtgtttgagacgtatctaccggtgctgcagtatggctgtcatatatttcaaagggtgcctatgttgactttgccgaagagtgcgacatcggtttacatggaatccatgcaaatactggaacactgcaggaagagcagcggcgtcttaggcggcgtcgtactgtacaataataaaataatcgccacacaactgcctcccgggctcacctcctacctaacagtggtggacccgtacagaataaagtctccggccgagaccctcgacactgagactccgctgccactcggtgctcaactcctcgtcgtgtacgtcgggaagaaactctatgataacttgaagaaacaggtcgataagatacaggagttccatcagaatggagaggagatgatcgctaagtttaagaagagtcaagaagtcgaacgcgaaaaacaacgcgattttccccaatccggcatgaagagagacaagtcgctactgtttaccgccgtccctgaagaagaccataccatgatatctccgcccagcagggaagagcgcaaccctgacgaggagaggaagcccccctccatgccagatgttgtaccgttcaccaacaaaccacgacaacggcccacgaaactgtcactaagcttcaaaacacaaaaatcattggacgaagatatccaagaaaatgacaaagtgttcacaggacaaactagtgtgtgctccacccccatggtcgagtacaaacgactccacggcaacatgctctccatctgccaaatacctgaaagccagcaagacaacatcaacacggaattagaacccgacgtcttaaaaaatatagaaaattgcaataaaattaatttggaaaacgaaaaacgggataacaaaatggttctagacatcaactgcatcgccgaccactacatcaacaaaccagatccaatcagaaagctggccagtgtcacagacctacaagagaccataaagaaattgtcaaatcgtgcgacgtcgaagtttaagttgaaacgatcgaaagtgtcactaaatgatgatactccgtcccctgaacatactcctaagaaccccggcactatgactataaacgacccactgttcccagtctttaggaacgatggtgttgccatatcggaatcccttttcaaccaatatttagaacagcactattctaaaatgaaacaagattctaccgacaatatgttcaccttcaacatgaaattatgtgagcaagaaaaatttgaagactttgattcggaattaaatagatctccacagaggactcctaagaagatagcaaaagattccacgaagacattaccgacggaccagtcgaggaggaaatctttatcgttgcctttgaaatctttgaacgaaagtacagattctcagatagggtcagaatcagaggcggctagtttcaaaaagaagttgactggtgtgcagctgacacctttgatggagaagctgagtcatttagcgttttctgacaagtcgagtgggtacagtagtagggttatgacgccgcttgagttgagggagttcctgacgccggcggctgacaggcagatcacatttactgataggccaaaaactcagcggcaggactcggagagtgacgatgactccgacaatgacttggagttgctgcccgagtacagcaagcatgccgtcaagtgcgcgctgtttgtgagcggactgcacaacatggcgctactcgcgttactcgacaccgacgctgccaataatgtggaaactattaatactctgtgggaaacatcgctaaacgccctaggcccaatagaacagaaatgtatcgagcctctagcagccgtcggtgacgcgactgactacagctacttgacgttagaccccgactggggcaccgtgcgcaaaggcgggccctgggccgcgctcgacatagccaccatgggactcatacataacgaattcgcagaagatcctgagatgtcagagtttatattgaggagtgacgagagcgtagtagtggggtctgtatgcggcggagcgcaggtgtactaccaagagaaggggccccgtggtgccgggccaccgccgccgtctgatgtactggcggccgcgccactgcgcgcgaggcgtcgtctacaccgtgatcacgccacgctactcctgtaatcctagcacgctgacttgtaaacaggtattaccattctatgactgttctagtgacgtcgcacttacgacatgaggtgcgtcaaagagaaatcgcaaccgaaattaaaatgttaccagaaagggatcgatgtataagccgttgaaatgttgttgtgttaagatttgtactgtttagaaaatacttctgtgggcatggtatttgtcaatttatcagcagtgatgcatggatagatttgtaacgaattcagtctagccgaacattgaaagagattattgttatgtaggtatactaatggaaagggcgttaagttcgacgatagtagagaagatagttttatcatgacttacatctacacttgaagtacataacagtatagatacttcgacaaaatggtgtcattataccttcctatttaattgaatattttggaaaatggatatctcgtccataattttgttctacctgcaacaacttacaggtatatgtagccaatttgagacttaatcacatctatttcatagtttctagtaccaatcttgttaagatgcaacttagtacctacattatcccaaatattatatgtaaccaataccaaatagctaatgaagctccacagaccctattccgttatattttttactgtaagtagagaaataagtaggtagctattgtatttcctgtagaactttattatttccacaaccagcatagtttacacatccagtagatcccaaataatgaatagcgttgtttttattgtgggtatatcgaaattatgacaaattcaatatgcgcctgaacgtactcaatgtacttattataatatcgattatagaaacacggatttaagaattttctaccaagcgtatggcatttttctaccattaaaatgttgcccacttaaaaaagcttgtaaatactgccaaattgttgttaattgtaaggaaaataaaattaggtgaagttttttatgaatgtcaatggtgtctgtatgaagagtaggtattatgtttttatacaagaattttttgcttttcataagctatgttcagcagctttacgcctgctgtactacaccaatatgatattatacaatgtgtgggtgaactgagggaccacactgggaattcgcaaaatgaaagttctaggatttagtagtagacctaaaacaattgtagaacgaatctgggaatttgtaaacaaatatattaaaaactacgacccataaagtgtggtccctcagttctcaaagacgatcagtcagatctcggaaagtatcttataaaatagggttttgtgaatacagacatttagtaaataatttgtaaagatatctattaaataacagaccacaaagcattaaagataaaaaaagtatagcaactgaactgtggtccctcagtccacataacaacgataaatattttagtgaatattactgaataaaaccgttattattttacataaagttttagtaaaagtcttaaaacatattgtaaaaagaaatggatcttaaatatcgaagcatttcgaagatagcgatgattaaaagtggtccctcaatcctctcctccactgacatatagacactgctagctgctagtcgagaggaatatcagaaagtctagtgtacttaacatttagggcggcttgcgcatcgtcgctaaatacagtttaaaagtgacgtaaacgcatttagtctgctaattatatttagcgtcttgcacaacaaaaatttaggcactaatcacgtttagcgaactgtcaaagttaaatacccaaagatggctatttagcttcgctaaatacgtttagtaccaatcgcgcgtcatcatatttatgtaggttatagacattttactattattttataaaagattgtaaagaggtcggtaggaagtttgtaagatggatttgtgggaattgtattctgacgacgacgagaagattatagaatatattaatagaccgagggaattgtttgaaagaacagacttatttggaatgtattcggaccacaaattctttaggtttcgtctaacgaaagaaaccacaatatttttgttacagcaaatagttataacatttaaaaaccagaaacaagtaaggaaatgtacttttattaatggatatggactgcctcgttggccgagtggttgcaagtgcgactcccgggtcgagcaaagtattactgggctttttcggattttcgaaaatttctcagtagtagcacgaagtctggacatgtgcccggtataaggcaataggctcaccacacattatatgggacttacaacataaattgtgaaaattgggtgtaaacataatgtgtggcttaaaggcgtgacgatatgtatttattaatggatattcaataaatagtaataaataaaaactagcaacaaataaggaaatgtacttttattaatggatattcaatcaatattagctattttgacctagtcattttgcttttcactctgttttatttggtcagtctttttgcactcaataatatgggtgtatggttccatcgctgcaatcagtgaaatctgttcttcttttgtaaaattaggcccccgggccctagaagaaacactttttttgccatggtaattatgactcaactaaaataataattattaatcaataaaaaataccacgagaacatttcacaaaatcacaacagcacaatgtgtgacagctcggttgacttgatgtgtcagttgaaagttcgtcggtccatattacgcatttttgttttaagaaatgcaacaattttgctctaagtcaaatctacaacgcacgaaagtgtaaaaaggaacgcaagaaactgcattaccgactctctaactatgattagttaaattaccatccatacggacatgagcaagagatttttaattgtatttaggttaaacatatttagcaagataaacacatttaactaaattctgtttagaccaaatgttgcgcaagccgcccttagtaatagttttctactaaataataggtatataaaattttgtgtttcttacctctaagctgagaaaatattaattttttaatcctatgaaaataggtagaccagtgtgaccacaaaatcaaacaaaatgtagacagtactattattctttatttaatatatcattatttagatgaaacgttgtttattgtcagtctgttgttgttgtattgtatatagagaaaccttaatttatataggtaccgaatttgaacgtacgttacgtgcgttcaaatttcacataccaacgaacgaacgaacgaacctaccgtacgttcagactcgcaaagcctacgttcagactctccaagttacgttgaccgaataatagtactgtctacactttgtttgattttgtggtcacactggtctacctattttcataggattaaaaaattaatattttctcagcttagaggtaagaaacacaaaattttatatacctattatttagtagaaaactattactaaatgttaagtacactagactttctgatattcctctcgactagcagctagcagtgtctatatgtcagtggaggagaggattgagggaccacttttaatcatcgctatcttcgaaatgcttcgatatttaagatccatttctttttacaatatgttttaagacttttactaaaactttatgtaaaataataacggttttattcagtaatattcactaaaatatttatcgttgttatgtggactgagggaccacagttcagttgctatactttttttatctttaatgctttgtggtctgttatttaatagatatctttacaaattatttactaaatgtctgtattcacaaaaccctattttataagatactttccgagatctgactgatcgtctttgagaactgagggaccacactttatgggtcgtagtttttaatatatttgtttacaaattcccagattcgttctacaattgttttaggtctactactaaatcctagaactttcattttgcgaattcccagtgtggtccctcagttcacccacacattattatacacacaatacctgtgccataaaagatgctgaaattgactcgttttatattttgttatatatttttatatgactacacaaagtatgtagtattttatttgacatcgtagtatcgacgtcttctattattaaccggtaaaatcttattcattttaatttccgttgaagtctgtaggtgtagtaaggggtgtaatgaaacttcacaaacattttggcttagtttatttaccaaatacgtagttattcgatggaacatcagttagtgggttaccgcgggttaaaaaaccactagggttgtgtaggtccagcattaatatttagtacatacctgccctatatagatattccttgcagtaatgtagtgactgcatcgtagactaattgtttcgagctcattctattcttgccactagaaaataagttattcggccaattctagattagtattgctacagagaatggtattgccaaattttatatttattttcttagacagctgaaagtctctagtccttccagaatttatcttgtagtatcttcgctaaaagctgttctttgctacgaactgggaacatagggtagttaaatttatgcgataatggattgtaggtattgaggcgtacaattatgttgataaaatactttgacataacattccaatgcataacaaaatgacgataactatggttcattatcttataacgataaagtggcagttttattttttatatttatagtgtcaaactttatagtattttccgccttagatgtaagtatatattgttgtaatgttgcttgccaagtaccttaagtgtacttttattcagcagtattatatgtgcaagcattccagatgtttgaagtagttgttggatttgaagtcgtacaaccactgtataaattacttctggaatgttcttgtatctcttcctcaagccattttcagatattttattgtatatttgacaacgctgtgctaagctatcaagcttaggcagaccataaacaggtgctatttgtgccaaatgtggcatcgcatgacaggcttacaagggtgcatttaaacgacaaaagacatcttgtttaaataattaaataaggcagacttcaaatcaaacattcaaatcatatcacattccacgtcccgtagctttaagtgacacaattccgccagaaatgaaatcgcgtccaatgcaatcaatgctaaacaaaacgatcatatgttgccgtgtattgtttttaatgttatttgtatattttaagagtatttaagtttatcagcggttagcctagtcgccatggtgagtgccaacacgacacgattatgtggtatatttataataataataattatacataaatattgttaagaattttaataaaaatctgatagagagaatttggttaatattattttactatataatacccattctattctaatactaatgttttgcataaaaaccgtagattttattgattggttacaactttagcagattggaatacgcactaggctcaatgtaatttagaacatctgagatgtatgcattgcctagtgggtagctatatctttacattaatttctattgtataattatgtgctttttccaatgtacattaatgtgcatcttatagaaagctaagacatcaaagattaattaaatattgttgctacagtttttatgcaataatctatttactattaatataaaactaactaaatgccgtcaatattacatacataattaggtagtataataaaatagatacaaaataaaagcagagtattcagtctgccagggtgtgacgacgctgacgtcggaccagggaatgattggactctaaccagacaggtagctcttgtatatggattttaatctattctttttttttcttgtaattctgatttcaatcacaacaaagtcactagttttatgacattgtctgtacaagcttgtgtaaattcaaagtttgaaagtaaagatacttcatgttattttgagttgtgctaaatatgacacagtaaacagtaagttgtcgcctcgattgccctagaccctacgcagcgtcagtcgagagaaaggatgcgatggatagagaaggtgggacgaaccaaagtgaatgaagaagaaccaataatgacgttacatctattgttttattaacaagtcgtacaacaacgctacgctaatatcgtgagatgccagactcgatacaaccgaatacataataatacatatgtaactagcaacacgagaaatgcgaggtcacgtcgccacaacgttagaatgtatatacggtagtcggaagataaagaatatgatctatgcgcgcgcgacttctctcttctatgtcttcgcaaagcttgggcttcctacttagcggctaactcgatcatattcttttcgcttcgacaagccggtgccgttggctgcgacacgtcacggacggacgcccggcggccggctgccggtcccggttccggcgagcgccatttcgaaaggacttttcaatcaaacattttcaaaacttcaacacagttagtttcaaggaacttcatcctttacttcttgtttcaataccttttcaaacaaacaaaatcaatattagacttagtgttaaatctttattagagctagttttacatcctagaggcaactatgcccgcgcgggcgttacacgctaacttagtctagaccctttcatcacattataattaacacaaaggagcttctctcttggggccgcgcggccggcgcacgctcggctgcggcccgcctgttacagaatgtatacaaacgttaacaatacggctagcactaccggccggtacagtacactataaatgcatagaagccggtcgacacatagttgggatctgttgtggtataaaatgctatgctatgtctgaagttgaactcagcatcacgaacttactaataacgacctgcaaagtcaaagaggggagtaactatgtgttaaaccagacatttattatggtgctacgtgtcaagtggcaatgtttctatcaatttattccatgctccacaaatgactagtggatattacaatgtttgttacagtacctagtgtaaaatatatcgagcaatgagtgcgcgataacaatgtaactcagcattatagcaatagtaataaactgaaaataacgtattactgtcgagccagtgccgagctggctgcggcgcgacgtcgtgtaattgccgttacatcataattgcggacacgcatggattatacagtaaatgattcagaactcatgaaccgagccgaataccaagagaataaattgatagaaaagtaatatatcagacattaaaaacttattcctaaataaactaaaagaaaaacaaagattcaaagacagaccccacttcatacaatcacaaacattatatacagaagttttggagttatttaccaatttatatatggaagagcaatgtttgcccactctttggtatatgaaaaaggtatctttgaataagtacaattgctcattgtttttgttaaggtttcacccttacacatgaaaatgtatttcaaataattagtctattgaaattataatgaatagaaactgagtgcactgactcaagataacctataataacaaaagaacgaataatgacttgtgtcaaaaataaaacaaaaaaatatatattatacaatatttgtacaataaagcttgagcttcaatagtcatacaaaaattctcacataaggggctataaagtatttgcacaattagcaagttaacagggctactaaaactataacaaattgactatcttctgttaaagtattaagggtgaattgtgtaaaacttgatgtacactcctttcatccaatttatattaatctatctaatttcactatttacatagtataattgactctacacagccaatagaagctgttacacatattgctatcgaatttacacaatagttgcgtatggcacgctatttgcaaacttgtaattttaagcattagtctcaccacttggggacttgctttcacaatatcagtgctcacactcaaaaatatatcaacactggttcgagttgtgaaagagaatagtaaaaacttcacatcgtgaatttcattaactacatcaatttgtatgcacaccaatattacaattttgtaattactgtcagcccaccaccacagagaatgactacaattcaaccagcctttgttgttgctagtactgtctacagagttaaagtagccctgtatgttggaacccgacaaattagttcaccactaccataaaatgtcctaattcacacatagaaaataactcaaaatagaaaaaatatctggttatgtatcaagctaaccatctggaacagtagggggggtaaaccacatctcgtgaaagtatttaatcctgcacacaatcgtcactcgacaatgaataaatgctcaggtaggagtagaattaaagaggttcaggaaccagatgaactagtagaatacttcattatattgacagtagtagtattctagtgttttatgaaaaaagtttatctccactgttcaagagtgtgtgacatgtttcatgtttctagcagtcttgtaagttgatctatgattttacatcctaatggtttgaattctgatggcttacaaattaccttgcttacacattttgtttggaaatagtatgccactggataaattgtgaaattatgtttatgagtaaataagattgtaaggagattttatggtgagtggttagctagaatggggctgggttaggagtggaagcctatcgctcttggtggtaataggacttacgcggcgagtaggagcgttcccgctcgtagcgccggcggcggtagtgcggcgacggcgaccggtgcctgtagccgcggtggtagtagtcgcgctcgcggtagccgcctccgcggtagtagtagtcgctggggaca

SEQ ID NO: 117 - DNA, 3586 bp, Spodoptera frugiperda
ttggcccggcgattctctacgaacattcgttctcgctccgaaaacgccaaatacgctttcaaaccaaaatggaggatttgtcggtcgaggtgtacggtgataatggtgcttattataaggccattgtcaccgacgttctcgacaacgaggttctcgtagcctttgaaaatgactggcagccggagtcgaaattcccgttctcccaagtgtttttaccaccgaaagacacaggcaagcatacagagttcgtggaaaaccaagaggtggaggtattcgcgagatccaatgaaaaggaagcatgtgggtggtggacagctaatatcaagatgatgagaggcgactttcttgtgatagaatacctagaatgggacaactgctacacggaaattgtgccaaaggaccgcctccgagtaaagactcccaagacacctattgacaagaataccttccacaagttcgaaataaccgtaccggatgatctcaaggactatgcgaaggtggagaacgctcacaaggagttccagaaggcgataggcgccgcgctggtgtggtacgtgccggagcgcggcgtgctggccgtcgtgtcgcgctgcgagacctcgcacaagcgcgcgcagatgttgcaggagatgcactttaggaatctaactcagaagctgttattgctgaaaaagactgaagaagcagccaaacagttggagtccactaaaatacataatcagggcggctacacagatgaattctccgtgcgtgaagatctgatgggattggcaatcggcacgcacggggctaacatacaacaagcacgcaaggtggccggagtcaccaacatcgagctggaggaggtttcatgcacgttcaagatctgtggcgagtcggtggaggcggtgcgcgcggcgcggtcgctgctggagtacgcggaggagtccatcaaggtgccgcgcgcgctcgtcgggaaggtcatcggcaagaacgggaaggtcatacaggagatcgtggacaagagcggagtggtgcgcgtcaaggtggagggcgacaacgagccgcagccgtcggcgccgcgcgaggagggcatggtgcccttcgtgttcgtgggcacgcgcgagaacatcgccaacgccaaggtgctggtggagtaccacgtggcgcacctcaaggaggtggagcagctgcgcgcagagaagcaggagatcgaccagcagctgcgctccgtgctgggcggcgccacgcagacataccccccgccgcgcggacagccccccgcgcgcgcccgacgcacgcgcccgccgcaccaccgctaccccaccggcgggcgccgcatgacgccggagttgggcgacgagcgcagcgacagcgccggctaccgcggccgcggcggacgggcgcccaggcccaacaggtcgagtgagcgcggcgagcgcggcgagcgccgcgtgccgctggagaacggccgcgcgcaccccgcgccgccgcgccaaccaaggactactgcgcccagtggcagacgacgcgaagacagacggaggcaaactgatgatgagagcagtgtgctagacagccaggacgtgtccagtgcggaccgaggaggcgggtggaagaacgggctgagcggcggcgggggcgcgggcggcggcgggggcgcgggcgcgggcggcggcgcggcgggcgagggcgcgcgcgcggcgccggccggctccaagcgccgctcgccgctggccaagcccaagcccgaggcgctgctcaacggcaccgcgtaggccgcgcccccgcccgcgcccccgcgcccccggccggccccggcccggccggccctgacgtgacgccagccgcgcccgcgcggcgcatataattatcctaacgtaacgtaacatgtatggcgcggcccccgccgccgccgggggcccgccgtcactagacttactcgtattatgcttttgtaagagattcgtgatttgtattcctgattactcgataatatgaaaaattaaagatgtgtacgtcgctcccggacgatacgcgccgatcgcggcctttcggtacctttatgggagatcggacatagcgcagtacatacgtgttcgtagcctgtactctgtggttatgtgatttcctataaaataaacatttctgtacatattttcaatcgtatttttatttgtacgaatagttcgttccgtcgtttcctccctgtctaaattacagagtgtagcgaccttacaattttttacaatatacacataattatgatgttgaaatacaattttaatactttataaaaatagtatgactagttggaatgttacatataattcttaaattaataatactataaactcgaaaggtacttcgatagggaagggggcgggatacatacatttagtttggtgtgacactaagaatttaaaattctaattgtgattcttatgacacagacctataaacaaatatttacagaactagactaaatatcagtcatataacagtaccgtgatatgcattattgccgggatatcactaggaagtatttacaaagatatgacgtcaggtaagagacgggagtacgtggctaacgtgaagcgaaaagaaatggaaagttcacaaaactaggccaagtacgaagtagagataatattctattataaacatggatacattacatttgctactgatataatttgaagcactagttttgtgaactagcctctgatgtaattacatcgagtctaacttacctactttatttaaacacgagaacttccaagaatacatgacaaagtaaaatatattatttcagattcaggtttagaatgatcttatgacattacttattacgaatcgaaaaatacataaaaaaacagcgttacattgcatgttccagattttttacttgttttagagttagtacttgtctatgctatgtaaaccaattgttttccagcaattgaaacgacaaaaatacaaaaaaaagatcgtatataaatgattacgtaggagtcgtagtcgatgttaacgaaattgacaaacgctggagcaacagtattggtattgtccagttgtacggatatagtatcatccattatgtataatgtactatgtattacagtgtagatttctttagaaacttgctttttgataataataaccatagtttgcgttatgtgcaataatattaaatacccaagtcttcttcaaaatggttgtctttgttttaagtacttagactaaataagtatgtatgtagttattcttagacacttcatggaatcaccaaattattaagtatttctaatcacttcacatcgttcgtctcctttacgtagtaggtacatatgcttgtacaaaatgatatgtgtctacactgtacaataattaggcttcagtatatatagtattatatacttaggaatactgtaatatttcctattataaacattcttttggaaagtcactggtgactattattatgagaaaagcattgtttttgtaaattcattaaacattgtatactttttaagtaaatgctgaagtctttaagacccagatatgattttgattcatggcataaaatatatgcgttttttactga

SEQ ID NO: 118 - DNA, 1883 bp, Spodoptera frugiperda
attatttaataaccacagcaaacctcaaatacgctctccgctcaaggttgttttctcttccaagaaccaaatcaacatggaggacctaactgtggaagtatgcggcgaaaacggagctctttataagggttttgttatagacgttttcgatgatgaggttcttatacacttcgaagatggttggcagccagactcaaaattcccctttagtcaagttaaattacccccaaaaccagatcccaaggtagaatttacagagaatatggaagtagaggtatattctagagctaataaccaagaagcctatggatggtggaaatcaaggataaagatgatgaagggcgacttctatgtccttgagtacatgggttgggaaacaacctacacagaaatagttagtgtggaccgtcttagagctaaaaacagcaatcctccaattgataaaaatatgttccacaaatttgaaatcgaagttcctgaagatgttcgtgaatatgccaagatagacagtgctcataaagagtttcaaaactcaatacatgcaggaatcataacctataatgctgaaaagggagttttgaacgtagtgtctaggtgtgagcaaagcagtaagttggcggcgatgctgcaagacatgcatttcagaagcctctcacaaaaagtgctcttattaaaacgtacagaagaagctgcccgtcaactggagagtaccaaattggcgacaataggagggtattcagatgagttcatcgttagagaagatttaatgggtttggcaatcggagcgcacggtgctaacattcaacaagctcgaaaagtagatggaattaccaatattgaattagaggagaattcttgcacgtttaaaatttatggtgagactgatgaggctgtgaaaaaggcgcgatccatgttagaatatagcgaagaatctctccaagttcccagggcgttggtcggcaaagttataggcaagaatggcaggatcatccaagaaattgtcgacaaaagcggggtggtacgggttaaaattgaaggtgacaatgagccacaaccgaccattccacgtgaagaagggcaggtaccttttgttttcgtaggaactgtagagagtatatctaatgcaaaagtacttctgcagtatcatttagcacacctaaaggaagtagagcagcttagacaagaaaaattagaaatcgatcagcaactgcgcagcatcaccggttcaagcttaggttcaatgcaaagcctctctatgagtcgccgaaacgatcgaggctacaattcagacatggacggcaacagtagatctggcagaggcggttcgatgagacctaccgccacgttattacggaggacctagaggtagaggtgggcgtcgagatctgcggcgtgacgacagaaggcgcacaacagatgacgaggatactgtcctagacagccaagaggtttccagtgtcgatagagtaaataaccaccacggcgctacaggactcaacgatgcttcacataacgacaacggccatcacgacaacatatccaagcctcgagacaccaagaaccgctctaacagacctccccagacgcgcaggaacgatcccaaacccaaggaaacgttggtgaacggtaccgccacgtagagcccaatgttcgcatcccttgaatgtttgtgcgctatcgtctattctcggtagaacgaactcttaggtttaattcactgtaaggttttcttggatgattcctaatagagggtggtatggcggttatatgatatttttaaggcggagaaaatttaggcagtttaggcggaaaggtctagatgcaatttttgaaattattaaagggaaaaagtacttaattaagttacttaagtattgtatgaa

SEQ ID NO: 119 - DNA, 1265 bp, Spodoptera frugiperda
cggcgattctctacgaacattcgttctcgctccgaaaacgccaaatacgctttcaaaccaaaatggaggatttgtcggtcgaggtgtacggtgataatggtgcttattataaggccattgtcaccgacgttctcgacaacgaggttctcgtagcctttgaaaatgactggcagccggagtcgaaattcccgttctcccaagtgtttttaccaccgaaagacacaggcaagcatacagagttcgtggaaaaccaagaggtggaggtattcgcgagatccaatgaaaaggaagcatgtgggtggtggacagctaatatcaagatgatgagaggcgactttcttgtgatagaatacctagaatgggacaactgctacacggaaattgtgccaaaggaccgcctccgagtaaagactcccaagacacctattgacaagaataccttccacaagttcgaaataaccgtaccggatgatctcaaggactatgcgaaggtggagaacgctcacaaggagttccagaaggcgataggcgccgcgctggtgtggtacgtgccggagcgcggcgtgctggccgtcgtgtcgcgctgcgagacctcgcacaagcgcgcgcagatgttgcaggagatgcactttaggaatctaactcagaagctgttattgctgaaaaagactgaagaagcagccaaacagttggagtccactaaaatacataatcagggcggctacacagatgaattctccgtgcgtgaagatctgatgggattggcaatcggcacgcacggggctaacatacaacaagcacgcaaggtggccggagtcaccaacatcgagctggaggaggtttcatgcacgttcaagatctgtggcgagtcggtggaggcggtgcgcgcggcgcggtcgctgctggagtacgcggaggagtccatcaaggtgccgcgcgcgctcgtcgggaaggtcatcggcaagaacgggaaggtcatacaggagatcgtggacaagagcggagtggtgcgcgtcaaggtggagggcgacaacgagccgcagccgtcggcgccgcgcgaggagggcatggtgcccttcgtgttcgtgggcacgcgcgagaacatcgccaacgccaaggtgctggtggagtaccacgtggcgcacctcaaggaggtggagcagctgcgcgcagagaagcaggagatcgaccagcagctgcgctccgtgctgggcggcgccacgcagacatacccgccgccgcgcggacagccccccgcgcgcgcc

SEQ ID NO: 120 - DNA, 26830 bp, Spodoptera frugiperda
tagctctcgtgcgaaccccgacgacgaaatcattccatccagccgtcgaagccgtgttctcgggggtttgggattgtgattttgtataaatccataagttatgtgccaacaacattacaaaacagagataatctgaaacgttacgagctgactgtaaagctgctctaaggatctgccgagcccgcattatctgtgatatacagctcagcctctcgtccgtcctataagggctgggccaatcggggctaggaggcgagtccgcagcagcttccagtggtgatctcaccttgtcctctaccatagaggcactaaacactgctacctgctttattgactgcatcactacgaaccattgttacttagtttataattgaaacaatatgctatctgtgaacataagtttaatgttaggtcaaatctgtagaaaattattctatttataataattgtctgatgtctaatgtttctgtaatattatgtgttcgacatctaattaaggataattgttactccaatattaatactgttaccgaaccaatgcaatgtaattactccaccttgatgttggtggtgaacacaaataattttggtgcttttcaagttgagaagaatgaaagtcatgaagctagtgtaaaaatggtagatttaaatatttataatgtagaatttgttgttagtgtccaacaaaaccaaatgattggcgaaacgcctaactactgcattcctttaacgattaacgccataacagtccagggtatctcatacagtgacccatatttcagtagctttaacttaaactataagatggcgttcggagcgccggagcatatgaacaagtctgattacgcttttaaatcctcagtttgtattatacgagatgagccttgcgatacgcaactactaaacgacaagtctgctcataatatgatatccaaaacgaaaactcgaatcattactaatgaagacaagtctgtgaagacataccatgacaataatgaattggaagttggttacgacaaacccgccaataaaacggctttgcgaatgttcgcgaacggtgatctcaccttcgacgctatgttggaactcacgaaaaacgaggatcgaattatcaaggaaatgaaaactcaagatgtggacagttggggcgttccccgacgccttcgactttgcggagggggcgaaagttcgctcaacaccgctactggctggggcagcccgcctgcctctaacaacgctgggaattggggcggtaattccagtggccaaacaaataatggaacaaacaatactcaacaatggaataacacggctcagcgcccgcccacttctcaagcagacatgaacagcaacaaggggaatggcaatcaaatgcccccaactagtggcgcgtctgcacagaattggcaaagctccccgccaaacatgccaaatgctcagcctaacaacaatggtgcaccaacgagcaatggtacgaacaacgcgggtaacggaaacaatggcggtactaatccacccaattcaacttcaaattcgaatggtcctacttcagccaatggtaacaatggcaacaacgccaacagcacttcctctgcaaagattgagcaactgaattcaatgagagaagctttgtttagtcaagatggctggggaggccaacatgtgaatcaagacacaaattgggatgtacctggcactcctgagcctggtccgggcaaagtagaaaaccaaccagctggaggtccccctgcctggaaaccgaatattaataatggcgcattccttggcaccgatctatgggaggctaacttacgaaatggtggacaaccaccgccgcaacccgcctcaaaaacgccatggggccacacgcctactacaaacattggtggtacatggggagaagatgatgatgtcgcagactctgctaacgtgtggaccggaccaccgccaccacagcagtggcccgcaggaccaccgcaacacgcgcaacagtggggcgttcccaagaaagatgattggaacgcgtggggtgaatctcatcgccctgtagatccacgtattgatcctcaccgctctagtgatccgcgccaacaaagcgctgacccacgccacgacttgcgtggaggaatatctggccgccttaacggagatatgtggagccagcatcatcagcacacagccggaccaaacaaaatgatgcccggtggcgtcaatcagtggggtgcacaaggacccaaagacccaatcaagggatcaggttgggaggaaccatcgcctccggcggcacgtcgcgctcccggtggcttcgatgatggaacctctttgtgggcacagcgcggaatgggtggcatggcagctcgcgggcctcagggtccccccggcccccaacgcatgccgcccacgcctaccaagcccgatgccgtatggggcgctcacgcccaacgcaatggctcctgggaagagccacatacgccagcgtggcctgaccgcgatgcgcctgcctggcctgatgcgtctggaccggcattgtggcctgtacctaagcccaaacctgctggacctggtactgcatggcctgatgatattggtgaatggggtggaccgaaaccgcagcaaggtggccctctgggcaagcagttgcctaaagaaatggtgtggaacagcaagcagttcagagctattgtgtgacacctgtacttgttatcataggttcctcgttgagatgggtttcaagaaagaggaagcagaggcagcattgcgcagccgcgatatgaacgctgaagaggcgttggaaatgctagccagcgctcgcggagacgggtggcgacgtgatgaacacttcggtggccaccacggcggccccttccagcctccaccgtcagtgcccgcggtgtctcccgccgtcgtgcagaagatcctcaaccagccgccgccgcctacccagcagcaccaccagtcttacaacccgaacagtggtacgggtaatggcgggcagccgagcgcagcgcaactacgcatgctcgtgcagcagatacaaatggcggtgtcagctgggtacctgaaccatcagatcctgaaccaacctctggctcctcaaactctcgtacttctgaatcaactgctgcaacagattaaagttctccagcagttgttgcaacagaactctcttgctatgaccaagggtcactcgtctctggcgctgcagtattctgtacaaatcactaaggctaagcagcagattacggctctccaaaaccagataacagcccagcaagctctgtacatgaagcagcaagctggcagctcggacttgttcaaacagggccatgatcctatcgcccagttgcagaacaactttagtgacatgactattccgaaagacactcaagggggttacggcagcagcagcggtaaccaacagtctcgcctgaaccaatggaagctgccgtctctggataaggacggcgagggctccgagtttagccgcgctccaggaactgccaagtctaccacgagcccacagctcaaccaacttggcctgcaacctgattcgacttggggagtcggccgtggctccgaaggttggggtgacagcagtgctgatgtagctgacggcaaagatgcctggccatcacacccagtgcaccaacctgtgtatgacttggttcctgaatttgaacctggcaagccgtggaagggcaaccaaatgaagaacgtagaagacgacccggcgatgactccaggctccgtagtgcggtccccactgtcactggcggccatcaaggactccgacatgctgggcggtaagacttccccgcccgggggcgagcgctcgctgtcctcgtccacgtggagctacgcgccccccggtggcgcgggtgccggcgccggcctgaagtctgacgcgtggggcgccaagccgcggcccgcgccccccggcctcaacaaggcgtggccccagcaccacaacaacgcgcccccgcgcgccgtgccctcctggcaggcctccacatggctactgctcaagaacctcactgctcagatcgatgggtccaccctgaagacgctctgcgttcagcatggccctctccagaacttccacttgtacttgaaccagggcctcgccctcgcccgctactcgacgcgcgaggaggccgctaaggcccagatggccctgaacaactgcgtgctgagcaacacgacgatcttcgcggagtcgccggcggagtcggaggtgcagctgatcctgcagcacctggggtcgggcggcggcggcgcgtggcgcggcggccagaaggacggctggggcgggttcgcggcgctgtggcccgactcgcacgaccagcgcgccacgccgtcctcgctcaactccttcctgccgcccgacctgctcggaggcgagtctatctaaggcgcgaaggagatctgtacagatgcatttgtccgtgtcgatcaggtttcggtcctaatttcgtttcggtcgcggtcgctcggaagtgtcgcctcggtcattcctgaggtgcaaattttttatggttagcgtaaaatcttcgatttggatagtataaatagtatttatcgatcggccggcaagtcgctcgatcgtcgaaggcgcgagtttaggatcgaagctttaggtgtctagttgtaattacgctttaccgtcccccgtacggggatcgactaattttattcgcctagtcagatcatgtcgagcgcgtcacgtggcgtcggagcacgcggcgcgacgcggtcgtggtagccaactgtccacatactatattatcttactgtgttttaagtgttcatgtagaatatttagtgtatataagaattatacatatacaatggcaaattaaactgtatcgaggtttataaggaagagtccggtcgcggcgggcgcgggccgcaccgcggtgagaccgcgcgcggcccgctcctgcaaatctaccaaataatcgtaggtatcagatagcgtagtgcgtcgcgggctacctcagtcacacgtcccgtggccttattttatagcgtatatttattttgttgtgctcgagggctgttgctgtttcgcccgtcgagctgcgttccgagtttctttcgtgttcgtttttattttctcgttttatctgtacttgtcgtattttaattattatttattctgttttgaattctcactcgcatagagccctcgttttccagtagtgatattttattcagcaataaacgtgtaagtgcatttcgcccactaacaaatcttttacgattagttgtaattttataaaggtaacaaaatttgaaaattatgagatttgaagtgcattcttgtagcggtaaattcctttaagccgtatagtctgatgcaaacgagtatatagttatatgcgttaggagcgagcgatggcagtcgccagcaagtacaaggtgggacgcgcgctcccttgcaatccagtaatcctgtgatgtaaagtatcttgcctaatgtaaggataatctattttgttggagagtatcatagcgcgagttgcaggcggtcggcctccgccgaagcgaccgtatccccaaattttttccagtatttgtgattgaagtgccactttatgtttaatataatgaaacgattatctagattatacgattaacgtaagggtaacctaatataataaattgaaaattgttttatcattttatattacacatacatttgtgagaaatgttattaaagtactataattgaacagtaattaaatattacacttttgtgtataggtaagaataaagttctaacttaaatttagccatatcaatatctatttaaataaaagatttgtggtattttctataggctcaatttgaacgttattcaaagtgacatatgctttagatattctgttaataatatacttgtagccgtaggtttgtcggtattacataattgtaggtgtaagtttacatttaagtcctatcgtagagttcaataagcatacaactgatatttaacggcaacgattgcacgtgtaagttaaagttcgttatcataaagtttatttacacttttatttactttttaatttattgatggtgtgccacagagatactctgccaaaatataaaattaccaattattacgggattagaatagtagagcgcgaggcagcaggcgcaggcaggcagacacacgggcctcgcgcctccgagtcgctccgagtcgatccgagtcgctccgagtcgctccgagccgatccgagtcgatccgagtcgctccgtcgcgacgacccaccgcgcccggccgaccggtcgccgcgcgccccccgacgacttattatgtaaattgtatctgtatttcgaacatcttccagtgtttttatgataaaacgattttagacttaagttagttataagcgattcgctgtaccttgtcgagccccggctcgcatactcttcacaaattaattaattaagttaggtgaacgcgatttggacgtgtcagtgcgtttgaactctgttcgcttcggacctgtagtagtctagtgttaaatgtttcgatgtgtgatgtgttcatttagaaacaatgttagcaattgtcattactaccgtattatcatactatagggaccgacggcagtttgcgttttcatcactgcatattcttcgttgcctttcgcgatttgtatcagatacagatttagtttgaacgcggagctgatatttccttacgtccgctcgtgcggcagacgtcggccgtcgtcggcgcggcgtctggacacagccgggtcgttggtacgaaggcatatatgcggccgaactatttgattcgccttccaaggggccataatcgagattgtcacggagtttaatgttaggtgccaaagagtgattatcaaagatgtccggaacaactgattgcatttctctgcttgataaagattcttccaaaatttgaaattatattcgcggtacgggttaatgatctgatgttcctataacatttcgtgttacgtctatgcaacaatagtgcacgtataaaacagacaaatgtcaattctatgtattgttaaagctcaatttaagtgatgagggtgtttcttttaccgattgatagaataataaagagtctaggtattattttaattaactgatattgttctgtccaattctacaccaatattcgataacgcctaaatctcagttgtttactctggtgcaaatttaaatttaatgatacagcaataaaatatttcatatttaatttttataaagttttttccattataaggttagacaagccgaacaaacggagagtataataaccagtgccctttagaatacgtcatccatagattaaagacgaaagaagtttatgcctttaaaattttagtcagttaaagttatcagtacttaataaataaaggattatacatattgtaaagtggacgtattttaaatgtgtagtgtcggtagcagtatatggtgttagagtagaggtgggtcggtagaggtgtccgcgtccgcgcacacaaggttgtgagtagcggccatcgcgccgcgctaactgaatctcccctcggttcaatgactgcatcattatttcctgcacacaattattgcgccatgtgcaatttagtctgtgttattattatgttgttgtgtatttatatgatacgtctatactgtaatatgtatatattgtggaattttattcgtaaaaatttaatacgcttcatgcttctctttaataacattttcgtgatttgtttctgttatttagaataaatttacgtacctacaagtaattataataatgatcatagatgtaaatataagtaaaataataaaaaaaaaaaattaaaaaccaaaaaaaaaattaaaaaaatatataaagaaaagcaattaaaagaaaccaatgattgtgcctcaatgaactgtggtacgttaccgtaaccgatggcaggtgtaatcgtttccttttcaaaatgtattgatatgaattgtgcgcctaggcaccgctctgtgactagctgtagacaatataaggctgcgagcagcggggttcgcgcccacgccttgtgtaatcattaatgagcttagctatgttttacttttattgtaataagtgttatttcatcaatcaacattttatatatatacctacgtatatgtaaatattttatctatttattttcggttttcatgaagtttacccgaattaacgtgtaatcttaaaattaattggttattttggagtgagatcatgcgcgtgtcgcgtgtttcgaacgatcgcatctattccataacacttgaatgccaaagtcgatgtctgtaagccattggacgaccgcttgtgttgttgacataaactacgtggatctctgacatcacaacaaactattgatcgtacaaataggagccattaatactgacagccgacgcttaggtcgctgttgtctctccaagctgctctggtgttattttagctcaactattcaagtagtttgctcatattgttgttaattttaattttttattatcttaattataaaactttcctagtgtggaataaaattctaaagttattttgtaatctccaaattagcttttaatgtactgaaccatagctgataactgcagtgtgtatggcgtaggactcatgccgcctaaacgacgcgtagcgcgttactttattttatagctttctttcgcttgtcactctaccgtccctgtggccttgtcttaaactagatatcatataaatcggtagctttattagttaagcctcaaatcgttctggtattcgaatggatatgtatttgtgtcaccaagttttattgtcgattcgttcgtgttgctagcgccaagaaagtcgatacaatagtggtcgggatatcgagcagcgcggttcaagggcgccgggccggtggcgtgacaatagttcggcttatttctggcttgacagcagtcgctgcagtagccccattgtggcaccactcgctcgatcaactgtctactcacatatagggaccaagtatctatgactattatccagtttcattttgcgctgaattcaataatacctaaataagctgaacattgcacactaaaagacattctcattttccattgttactagatgcgtttgccgtcgcgtgttacagacgatgttacttataatacgacatattgatagtgatagtgcgtacgatattcaggagggccttttaatttaaataaggttaaagttttgcttgttgtctttatttatatatatttttgtacgttgcgtcgttgacgtcctaatacaatagagaacacattaggtgatatctacaaagaaactagtcttccttatttacgagggatcgtgttgagatggcggggacgcgtgacgtcgacacaagaggcaatcattcctctagtcttgttatgtggtgcgaataagtgaataccaaatataaaataacgaaggctttgacgttagtgtgtagaggttacgtatcgataggtcggcccgagcagcttggactgtcaatcttacaagggaatggttgggtagtattattataatgcatttatttctctttttttcatagtcactcaatcatatatttaattgagctaatgcctaaaaattggaatatcagagtttatttaggatgttcatattttacattttagtgtttaaatatctaaaatttaccttaattatagtgaatggatttttgtattattggaatatatagctgtaagacatagggtgttcttgataaaacacaaacaactgattataaacaaaataataaaaaaatgtactgagtgactttacgtgtaaacagagggccattgataaaaatgttgaactaagctaaattctctatgtggtaatttaactaaatgtgattgctgagaatattttaactgctatgatgtatagatgtaatagagcagtaagtctgcacgtttctgttggcgtacaagtgacgtgcaccccggtagacacatcgcggctctgccttactttcggatacttgagtaaagttgcatttgattcgacgagtactatgtagcgtaatatatatgtatgtatgtgtacaaggccaacccccaccaacagttaattgatgcagtagactcggactgctgctcgctaactacacactgcttctctagtctctctcgcattcatgtatcgcacgtagcgacgtgcgagtgattataatcgagcataatttaacgatcatatcctatatgaaactagtttatattcgtattattctttcattagatctctgttgtacctgtgtcaaattgtttatattcaatgttcatttgtactataagagaagtgtaccggtctcgaccacaccgtgcttgacatatacgtaatcgcgtacttcgaacgaccaaattcgttaatgttccactaaagtactaataacctctcaatatttagatatttctattggcgtcaaaatcaatactctgcggtcttaaattagtcacttttgtaccttgattgtacttgtacttgaataatatcctatgtaagtgaggaacgactaatccaattctgaaatatacttaatttaaattttgacagactgatatctgtgattaagaaaatatttttaatattgtccagtgagtcggatgagaatatttattttattagaggtctcctactgccagcggcacatgttatgtgacgagacataatatttaactgcttcgtatatttttttactttagtatcgaatgtatcgagctggaatacatttggaagaccattttatgagtggactagtaccgttgtcggtttatgttgtacaaaacgaacaagcttaattagtaattaaaaccccaccatgtaatgatatagtgtaccgatatatcccaatgaaagtaagttaacactcagtatcatgacatcaccgccgctccagggcggagactgatcacaacaatttatttcgagtaccaccgatgtcatctgaaatttgttttaaataattgatctttgaacgttgcatatcgtctacatttctaattcgaattattttgttgtattcatatccgtggttcccgtgatgtgcgttaagttttgtaatcgtaaaaccttaagttatcataataatgaatactaaattgattgtcccctagtattgtagtgagtcacatctctataaagtatgaacgattggcgttgttttataataaaaataatatttttcggtaccacctttgagttaaagtacaatgtagtatataaagcatgtttcagcgacgtatttcattataacaatatcaatataactaattgataagtttagcgtagacttaggctgtctcgtctcacgttacaccaataatattaataattaataattctccttggtattgtattggaacacttaataaataagcagatactaaattatttcataattatatcaataggctaaatatattcgaaaaaaaaaaactaaaagatttttctgtgtaaatctctgtgatgggaaaaatttattctaaagatctagtattaactgaaagtgacacgagggtcgtactatgaagcattttccttgcgtttgcaggagatccaagtatatgtacgctaaactcatatgaagcacatctttgtcgaacgcacggaatattagtctgtattgcatttcatgctaggacccgagtttcatggtgactttaaaagttgaacttttcagtcttttcgcgcaaagggttgtgtattattttttatgtagtacaaaatgtgttcgcaatttgattgctgctgtagtgttccttatgttcttcaaattatctttgttgggtatttattttgaaactttgtattctcaatgtctaaagtataatatgtaataatataattatgatcgtaataataatgaggcatgcgtaagtaattttcacgtagtaagtttatgaacggctgccttaatagtaatatgaatttgtattgatctgtacaccatcctctacgtatgttccgtcacgtaccaaataatagcgtagcggctgccccgcggcgagcgcccgcgtgcctctgtcacactcgtcctacacctatacttgttgtagatctatttttgcaagggccgtgtttttagacatcgccgtctccatttacataaggtgtagacagtagcacagatgcgaatggtcggctgcgtccgaggcatcggcagcggttctatgttcttatatctgtattacctcattcaataacctcacatagtatgtcctatctatatcaatgtatttatcgattctctgtacttatcaaacgcactgcactgttatttggtacacaattttaacaatttctttaagttaattaagggtttatcatgaattttatcagtgtatcaaatagtcgatatattttactgttatttttctgatactaccttaaaagcaatgtatattaacaaacaaagcaggagaacaataattattatgtaagtgtaacagttagtgaatttaagtgtgctattttccattccagaactcaacgatatcattgttcttgtaatacttatgttcgggttttaaaaatgttattattgtatttaactaaaccttatgtgattgaaatgcaatgtttagaagtatttttattctttattttttaccattaattaataatagttagtagagatctatttgagagtctaatgtatcaattatttgtaaagttggctgtaactaattagaagttacaataagtagaaatattttaatataaacatttggagcaaattttatgtagatgacaaatagttgttttgatcattatgtgaaatgttgtctcgtattgttagcgcaatgtgtacgcacaacggtgaggcgggtcgggcggtgcgctcgcgctcgcaccccgcgggccgcgagccgcgactcgcgccctcgcgccctcgccccgagcggcggcggtcagagctcgagcgcgccgcccagccaccggaggaccctctacactcactgcacagcactgctagactaattcagttattgcgtaaggatatttttcttacatttcgataagtgtaatgtttatagaataggcaataaataatgtttaacaaaaagtccctatttaatcgaactgacgacagaaacgcatgttatatttgtggcctctttatgaagtaagatctaagttacattttaaaagaaaattaattttgctatgcacataaatgatactcaattaattgccaaaaagtaatatatattcatagttcaacaatatttcttttgggcatatttactttgaatttatgcaaaacttagattatgagtaagtaggttgtagattatatgtagagtgaacgcatattatattattataatatatctatatatattaaagtaaggtgaatttgagaggtatcaatttcttgtattgttcgtaagtttagataataaatgggtttagccatacttcggctggtttgtttgtataaatccataagttatgtgccaacaacattacaaaacagagataatctgaaacgttacgagctgactgtaaagctgctctaaggatctgccgagcccgcattatctgtgatatacagctcagcctctcgtccgtcctataagggctgggccaatcggggctaggaggcgagtccgcagcagcttccagtggtgatctcaccttgtcctctaccatagaggcactaaacactgctacctgctttattgactgcatcactacgaaccattgttacttagtttataattgaaacaatatgctatctgtgaacataagtttaatgttaggtcaaatctgtagaaaattattctatttataataattgtctgatgtctaatgtttctgtaatattatgtgttcgacatctaattaaggataattgttactccaatattaatactgttaccgaaccaatgcaatgtaattactccaccttgatgttggtggtgaacacaaataattttggtgcttttcaagttgagaagaatgaaagtcatgaagctagtgtaaaaatggtagatttaaatatttataatgtagaatttgttgttagtgtccaacaaaaccaaatgattggcgaaacgcctaactactgcattcctttaacgattaacgccataacagtccagggtatctcatacagtgacccatatttcagtagctttaacttaaactataagatggcgttcggagcgccggagcatatgaacaagtctgattacgcttttaaatcctcagtttgtattatacgagatgagccttgcgatacgcaactactaaacgacaagtctgctcataatatgatatccaaaacgaaaactcgaatcattactaatgaagacaagtctgtgaagacataccatgacaataatgaattggaagttggttacgacaaacccgccaataaaacggctttgcgaatgttcgcgaacggtgatctcaccttcgacgctatgttggaactcacgaaaaacgaggatcgaattatcaaggaaatgaaaactcaagatgtggacagttggggcgttccccgacgccttcgactttgcggagggggcgaaagttcgctcaacaccgctactggctggggcagcccgcctgcctctaacaacgctgggaattggggcggtaattccagtggccaaacaaataatggaacaaacaatactcaacaatggaataacacggctcagcgcccgcccacttctcaagcagacatgaacagcaacaaggggaatggcaatcaaatgcccccaactagtggcgcgtctgcacagaattggcaaagctccccgccaaacatgccaaatgctcagcctaacaacaatggtgcaccaacgagcaatggtacgaacaacgcgggtaacggaaacaatggcggtactaatccacccaattcaacttcaaattcgaatggtcctacttcagccaatggtaacaatggcaacaacgccaacagcacttcctctgcaaagattgagcaactgaattcaatgagagaagctttgtttagtcaagatggctggggaggccaacatgtgaatcaagacacaaattgggatgtacctggcactcctgagcctggtccgggcaaagtagaaaaccaaccagctggaggtccccctgcctggaaaccgaatattaataatggcgcattccttggcaccgatctatgggaggctaacttacgaaatggtggacaaccaccgccgcaacccgcctcaaaaacgccatggggccacacgcctactacaaacattggtggtacatggggagaagatgatgatgtcgcagactctgctaacgtgtggaccggaccaccgccaccacagcagtggcccgcaggaccaccgcaacacgcgcaacagtggggcgttcccaagaaagatgattggaacgcgtggggtgaatctcatcgccctgtagatccacgtattgatcctcaccgctctagtgatccgcgccaacaaagcgctgacccacgccacgacttgcgtggaggaatatctggccgccttaacggagatatgtggagccagcatcatcagcacacagccggaccaaacaaaatgatgcccggtggcgtcaatcagtggggtgcacaaggacccaaagacccaatcaagggatcaggttgggaggaaccatcgcctccggcggcacgtcgcgctcccggtggcttcgatgatggaacctctttgtgggcacagcgcggaatgggtggcatggcagctcgcgggcctcagggtccccccggcccccaacgcatgccgcccacgcctaccaagcccgatgccgtatggggcgctcacgcccaacgcaatggctcctgggaagagccacatacgccagcgtggcctgaccgcgatgcgcctgcctggcctgatgcgtctggaccggcattgtggcctgtacctaagcccaaacctgctggacctggtactgcatggcctgatgatattggtgaatggggtggaccgaaaccgcagcaaggtggccctctgggcaagcagttgcctaaagaaatggtgtggaacagcaagcagttcaggttcctcgttgagatgggtttcaagaaagaggaagcagaggcagcattgcgcagccgcgatatgaacgctgaagaggcgttggaaatgctagccagcgctcgcggagacgggtggcgacgtgatgaacacttcggtggccaccacggcggccccttccagcctccaccgtcagtgcccgcggtgtctcccgccgtcgtgcagaagatcctcaaccagccgccgccgcctacccagcagcaccaccagtcttacaacccgaacagtggtacgggtaatggcgggcagccgagcgcagcgcaactacgcatgctcgtgcagcagatacaaatggcggtgtcagctgggtacctgaaccatcagatcctgaaccaacctctggctcctcaaactctcgtacttctgaatcaactgctgcaacagattaaagttctccagcagttgttgcaacagaactctcttgctatgaccaagggtcactcgtctctggcgctgcagtattctgtacaaatcactaaggctaagcagcagattacggctctccaaaaccagataacagcccagcaagctctgtacatgaagcagcaagctggcagctcggacttgttcaaacagggccatgatcctatcgcccagttgcagaacaactttagtgacatgactattccgaaagacactcaagggggttacggcagcagcagcggtaaccaacagtctcgcctgaaccaatggaagctgccgtctctggataaggacggcgagggctccgagtttagccgcgctccaggaactgccaagtctaccacgagcccacagctcaaccaacttggcctgcaacctgattcgacttggggagtcggccgtggctccgaaggttggggtgacagcagtgctgatgtagctgacggcaaagatgcctggccatcacacccagtgcaccaacctgtgtatgacttggttcctgaatttgaacctggcaagccgtggaagggcaaccaaatgaagaacgtagaagacgacccggcgatgactccaggctccgtagtgcggtccccactgtcactggcggccatcaaggactccgacatgctgggcggtaagacttccccgcccgggggcgagcgctcgctgtcctcgtccacgtggagctacgcgccccccggtggcgcgggtgccggcgccggcctgaagtctgacgcgtggggcgccaagccgcggcccgcgccccccggcctcaacaaggcgtggccccagcaccacaacaacgcgcccccgcgcgccgtgccctcctggcaggcctccacatggctactgctcaagaacctcactgctcagatcgatgggtccaccctgaagacgctctgcgttcagcatggccctctccagaacttccacttgtacttgaaccagggcctcgccctcgcccgctactcgacgcgcgaggaggccgctaaggcccagatggccctgaacaactgcgtgctgagcaacacgacgatcttcgcggagtcgccggcggagtcggaggtgcagctgatcctgcagcacctggggtcgggcggcggcggcgcgtggcgcggcggccagaaggacggctggggcgggttcgcggcgctgtggcccgactcgcacgaccagcgcgccacgccgtcctcgctcaactccttcctgccgcccgacctgctcggaggcgagtctatctaaggcgcgaaggagatctgtacagatgcatttgtccgtgtcgatcaggtttcggtcctaatttcgtttcggtcgcggtcgctcggaagtgtcgcctcggtcattcctgaggtgcaaattttttatggttagcgtaaaatcttcgatttggatagtataaatagtatttatcgatcggccggcaagtcgctcgatcgtcgaaggcgcgagtttaggatcgaagctttaggtgtctagttgtaattacgctttaccgtcccccgtacggggatcgactaattttattcgcctagtcagatcatgtcgagcgcgtcacgtggcgtcggagcacgcggcgcgacgcggtcgtggtagccaactgtccacatactatattatcttactgtgttttaagtgttcatgtagaatatttagtgtatataagaattatacatatacaatggcaaattaaactgtatcgaggtttataaggaagagtccggtcgcggcgggcgcgggccgcaccgcggtgagaccgcgcgcggcccgctcctgcaaatctaccaaataatcgtaggtatcagatagcgtagtgcgtcgcgggctacctcagtcacacgtcccgtggccttattttatagcgtatatttattttgttgtgctcgagggctgttgctgtttcgcccgtcgagctgcgttccgagtttctttcgtgttcgtttttattttctcgttttatctgtacttgtcgtattttaattattatttattctgttttgaattctcactcgcatagagccctcgttttccagtagtgatattttattcagcaataaacgtgtaagtgcatttcgcccactaacaaatcttttacgattagttgtaattttataaaggtaacaaaatttgaaaattatgagatttgaagtgcattcttgtagcggtaaattcctttaagccgtatagtctgatgcaaacgagtatatagttatatgcgttaggagcgagcgatggcagtcgccagcaagtacaaggtgggacgcgcgctcccttgcaatccagtaatcctgtgatgtaaagtatcttgcctaatgtaaggataatctattttgttggagagtatcatagcgcgagttgcaggcggtcggcctccgccgaagcgaccgtatccccaaattttttccagtatttgtgattgaagtgccactttatgtttaatataatgaaacgattatctagattatacgattaacgtaagggtaacctaatataataaattgaaaattgttttatcattttatattacacatacatttgtgagaaatgttattaaagtactataattgaacagtaattaaatattacacttttgtgtataggtaagaataaagttctaacttaaatttagccatatcaatatctatttaaataaaagatttgtggtattttctataggctcaatttgaacgttattcaaagtgacatatgctttagatattctgttaataatatacttgtagccgtaggtttgtcggtattacataattgtaggtgtaagtttacatttaagtcctatcgtagagttcaataagcatacaactgatatttaacggcaacgattgcacgtgtaagttaaagttcgttatcataaagtttatttacacttttatttactttttaatttattgatggtgtgccacagagatactctgccaaaatataaaattaccaattattacgggattagaatagtagagcgcgaggcagcaggcgcaggcaggcagacacacgggcctcgcgcctccgagtcgctccgagtcgatccgagtcgctccgagtcgctccgagccgatccgagtcgatccgagtcgctccgtcgcgacgacccaccgcgcccggccgaccggtcgccgcgcgccccccgacgacttattatgtaaattgtatctgtatttcgaacatcttccagtgtttttatgataaaacgattttagacttaagttagttataagcgattcgctgtaccttgtcgagccccggctcgcatactcttcacaaattaattaattaagttaggtgaacgcgatttggacgtgtcagtgcgtttgaactctgttcgcttcggacctgtagtagtctagtgttaaatgtttcgatgtgtgatgtgttcatttagaaacaatgttagcaattgtcattactaccgtattatcatactatagggaccgacggcagtttgcgttttcatcactgcatattcttcgttgcctttcgcgatttgtatcagatacagatttagtttgaacgcggagctgatatttccttacgtccgctcgtgcggcagacgtcggccgtcgtcggcgcggcgtctggacacagccgggtcgttggtacgaaggcatatatgcggccgaactatttgattcgccttccaaggggccataatcgagattgtcacggagtttaatgttaggtgccaaagagtgattatcaaagatgtccggaacaactgattgcatttctctgcttgataaagattcttccaaaatttgaaattatattcgcggtacgggttaatgatctgatgttcctataacatttcgtgttacgtctatgcaacaatagtgcacgtataaaacagacaaatgtcaattctatgtattgttaaagctcaatttaagtgatgagggtgtttcttttaccgattgatagaataataaagagtctaggtattattttaattaactgatattgttctgtccaattctacaccaatattcgataacgcctaaatctcagttgtttactctggtgcaaatttaaatttaatgatacagcaataaaatatttcatatttaatttttataaagttttttccattataaggttagacaagccgaacaaacggagagtataataaccagtgccctttagaatacgtcatccatagattaaagacgaaagaagtttatgcctttaaaattttagtcagttaaagttatcagtacttaataaataaaggattatacatattgtaaagtggacgtattttaaatgtgtagtgtcggtagcagtatatggtgttagagtagaggtgggtcggtagaggtgtccgcgtccgcgcacacaaggttgtgagtagcggccatcgcgccgcgctaactgaatctcccctcggttcaatgactgcatcattatttcctgcacacaattattgcgccatgtgcaatttagtctgtgttattattatgttgttgtgtatttatatgatacgtctatactgtaatatgtatatattgtggaattttattcgtaaaaatttaatacgcttcatgcttctctttaataacattttcgtgatttgtttctgttatttagaataaatttacgtacctacaagtaattataataatgatcatagatgtaaatataagtaaaataataaaaaaaaaaaattaaaaaccaaaaaaaaaattaaaaaaatatataaagaaaagcaattaaaagaaaccaatgattgtgcctcaatgaactgtggtacgttaccgtaaccgatggcaggtgtaatcgtttccttttcaaaatgtattgatatgaattgtgcgcctaggcaccgctctgtgactagctgtagacaatataaggctgcgagcagcggggttcgcgcccacgccttgtgtaatcattaatgagcttagctatgttttacttttattgtaataagtgttatttcatcaatcaacattttatatatatacctacgtatatgtaaatattttatctatttattttcggttttcatgaagtttacccgaattaacgtgtaatcttaaaattaattggttattttggagtgagatcatgcgcgtgtcgcgtgtttcgaacgatcgcatctattccataacacttgaatgccaaagtcgatgtctgtaagccattggacgaccgcttgtgttgttgacataaactacgtggatctctgacatcacaacaaactattgatcgtacaaataggagccattaatactgacagccgacgcttaggtcgctgttgtctctccaagctgctctggtgttattttagctcaactattcaagtagtttgctcatattgttgttaattttaattttttattatcttaattataaaactttcctagtgtggaataaaattctaaagttattttgtaatctccaaattagcttttaatgtactgaaccatagctgataactgcagtgtgtatggcgtaggactcatgccgcctaaacgacgcgtagcgcgttactttattttatagctttctttcgcttgtcactctaccgtccctgtggccttgtcttaaactagatatcatataaatcggtagctttattagttaagcctcaaatcgttctggtattcgaatggatatgtatttgtgtcaccaagttttattgtcgattcgttcgtgttgctagcgccaagaaagtcgatacaatagtggtcgggatatcgagcagcgcggttcaagggcgccgggccggtggcgtgacaatagttcggcttatttctggcttgacagcagtcgctgcagtagccccattgtggcaccactcgctcgatcaactgtctactcacatatagggaccaagtatctatgactattatccagtttcattttgcgctgaattcaataatacctaaataagctgaacattgcacactaaaagacattctcattttccattgttactagatgcgtttgccgtcgcgtgttacagacgatgttacttataatacgacatattgatagtgatagtgcgtacgatattcaggagggccttttaatttaaataaggttaaagttttgcttgttgtctttatttatatatatttttgtacgttgcgtcgttgacgtcctaatacaatagagaacacattaggtgatatctacaaagaaactagtcttccttatttacgagggatcgtgttgagatggcggggacgcgtgacgtcgacacaagaggcaatcattcctctagtcttgttatgtggtgcgaataagtgaataccaaatataaaataacgaaggctttgacgttagtgtgtagaggttacgtatcgataggtcggcccgagcagcttggactgtcaatcttacaagggaatggttgggtagtattattataatgcatttatttctctttttttcatagtcactcaatcatatatttaattgagctaatgcctaaaaattggaatatcagagtttatttaggatgttcatattttacattttagtgtttaaatatctaaaatttaccttaattatagtgaatggatttttgtattattggaatatatagctgtaagacatagggtgttcttgataaaacacaaacaactgattataaacaaaataataaaaaaatgtactgagtgactttacgtgtaaacagagggccattgataaaaatgttgaactaagctaaattctctatgtggtaatttaactaaatgtgattgctgagaatattttaactgctatgatgtatagatgtaatagagcagtaagtctgcacgtttctgttggcgtacaagtgacgtgcaccccggtagacacatcgcggctctgccttactttcggatacttgagtaaagttgcatttgattcgacgagtactatgtagcgtaatatatatgtatgtatgtgtacaaggccaacccccaccaacagttaattgatgcagtagactcggactgctgctcgctaactacacactgcttctctagtctctctcgcattcatgtatcgcacgtagcgacgtgcgagtgattataatcgagcataatttaacgatcatatcctatatgaaactagtttatattcgtattattctttcattagatctctgttgtacctgtgtcaaattgtttatattcaatgttcatttgtactataagagaagtgtaccggtctcgaccacaccgtgcttgacatatacgtaatcgcgtacttcgaacgaccaaattcgttaatgttccactaaagtactaataacctctcaatatttagatatttctattggcgtcaaaatcaatactctgcggtcttaaattagtcacttttgtaccttgattgtacttgtacttgaataatatcctatgtaagtgaggaacgactaatccaattctgaaatatacttaatttaaattttgacagactgatatctgtgattaagaaaatatttttaatattgtccagtgagtcggatgagaatatttattttattagaggtctcctactgccagcggcacatgttatgtgacgagacataatatttaactgcttcgtatatttttttactttagtatcgaatgtatcgagctggaatacatttggaagaccattttatgagtggactagtaccgttgtcggtttatgttgtacaaaacgaacaagcttaattagtaattaaaaccccaccatgtaatgatatagtgtaccgatatatcccaatgaaagtaagttaacactcagtatcatgacatcaccgccgctccagggcggagactgatcacaacaatttatttcgagtaccaccgatgtcatctgaaatttgttttaaataattgatctttgaacgttgcatatcgtctacatttctaattcgaattattttgttgtattcatatccgtggttcccgtgatgtgcgttaagttttgtaatcgtaaaaccttaagttatcataataatgaatactaaattgattgtcccctagtattgtagtgagtcacatctctataaagtatgaacgattggcgttgttttataataaaaataatatttttcggtaccacctttgagttaaagtacaatgtagtatataaagcatgtttcagcgacgtatttcattataacaatatcaatataactaattgataagtttagcgtagacttaggctgtctcgtctcacgttacaccaataatattaataattaataattctccttggtattgtattggaacacttaataaataagcagatactaaattatttcataattatatcaataggctaaatatattcgaaaaaaaaaaactaaaagatttttctgtgtaaatctctgtgatgggaaaaatttattctaaagatctagtattaactgaaagtgacacgagggtcgtactatgaagcattttccttgcgtttgcaggagatccaagtatatgtacgctaaactcatatgaagcacatctttgtcgaacgcacggaatattagtctgtattgcatttcatgctaggacccgagtttcatggtgactttaaaagttgaacttttcagtcttttcgcgcaaagggttgtgtattattttttatgtagtacaaaatgtgttcgcaatttgattgctgctgtagtgttccttatgttcttcaaattatctttgttgggtatttattttgaaactttgtattctcaatgtctaaagtataatatgtaataatataattatgatcgtaataataatgaggcatgcgtaagtaattttcacgtagtaagtttatgaacggctgccttaatagtaatatgaatttgtattgatctgtacaccatcctctacgtatgttccgtcacgtaccaaataatagcgtagcggctgccccgcggcgagcgcccgcgtgcctctgtcacactcgtcctacacctatacttgttgtagatctatttttgcaagggccgtgtttttagacatcgccgtctccatttacataaggtgtagacagtagcacagatgcgaatggtcggctgcgtccgaggcatcggcagcggttctatgttcttatatctgtattacctcattcaataacctcacatagtatgtcctatctatatcaatgtatttatcgattctctgtacttatcaaacgcactgcactgttatttggtacacaattttaacaatttctttaagttaattaagggtttatcatgaattttatcagtgtatcaaatagtcgatatattttactgttatttttctgatactaccttaaaagcaatgtatattaacaaacaaagcaggagaacaataattattatgtaagtgtaacagttagtgaatttaagtgtgctattttccattccagaactcaacgatatcattgttcttgtaatacttatgttcgggttttaaaaatgttattattgtatttaactaaaccttatgtgattgaaatgcaatgtttagaagtatttttattctttattttttaccattaattaataatagttagtagagatctatttgagagtctaatgtatcaattatttgtaaagttggctgtaactaattagaagttacaataagtagaaatattttaatataaacatttggagcaaattttatgtagatgacaaatagttgttttgatcattatgtgaaatgttgtctcgtattgttagcgcaatgtgtacgcacaacggtgaggcgggtcgggcggtgcgctcgcgctcgcaccccgcgggccgcgagccgcgactcgcgccctcgcgccctcgccccgagcggcggcggtcagagctcgagcgcgccgcccagccaccggaggaccctctacactcactgcacagcactgctagactaattcagttattgcgtaaggatatttttcttacatttcgataagtgtaatgtttatagaataggcaataaataatgtttaacaaaaagtccctatttaatcgaactgacgacagaaacgcatgttatatttgtggcctctttatgaagtaagatctaagttacattttaaaagaaaattaattttgctatgcacataaatgatactcaattaattgccaaaaagtaatatatattcatagttcaacaatatttcttttgggcatatttactttgaatttatgcaaaacttagattatgagtaagtaggttgtagattatatgtagagtgaacgcatattatattattataatatatctatatatattaaagtaaggtgaatttgagaggtatcaatttcttgtattgttcgtaagtttagataataaatgggtttagccatacttcggctggtttg

SEQ ID NO: 121 - DNA, 2169 bp, Spodoptera frugiperda
atgccagccattggaatagatctgggtaccacatactcgtgcgtcggcgtgtggcagcacggcaacgtggagatcatcgccaacgaccagggcaaccgcaccacaccatcctatgtggccttcacggacacggagcgcctcatcggagacgcagccaagaaccaggtcgccctcaaccccaacaacacggtgttcgacgccaagcgactgatcggaaggaaattcgacgaccccaagatccaggcagacatgaaacactggcccttcagggtggtcagcgactgcggcaaaccgaagatccaagtggagttcaagggggaaacgaaacggttcgcgcccgaggagatcagcagcatggtgctgacgaagatgaaggagacggcggaagcttacctcggaacgacagtacgcgacgcggtgatcacagtgccggcgtacttcaacgactctcagcgccaggccaccaaggacgcgggagccatcgccgggctgaacgtgctcaggatcatcaacgagcccacagccgctgcgctcgcgtacggcctcgacaagaacctcaagggcgagaggaacgtcctcatcttcgacctcggcggcggaacgttcgacgtgtcgatcctgaccatcgacgaaggctcgttgttcgaagtgagggcgacggcgggcgacacgcatctcggaggcgaggacttcgacaacagattggtgaaccatctcgcggacgagttcaagcgcaagtacaagaaggacatgcgcatgaatcctcgcgcactgcgccgcctccgcacagccgccgagcgcgctaagcgcacgctgtcgtccagcaccgaagccaccatcgagatcgacgcgctctacgagggaatcgacttctacactcgcgtgtcccgcgcgcgcttcgaagagctcaacgcagacctgttccgaggcaccctcgagccggtcgagaaggcgctcaaggacgccaagatggacaagagccagatccacgacgtcgtcctcgtcggaggctccaccaggatcccgaaggtgcagagtctgctgcagaacttcttctgcggcaagaagctgaacctctccatcaacccggacgaggcggtcgcgtacggcgcggccgtccaggcggccatcctgagcggcgagcaagactcgaagatccaggacgtgttgctggtggacgtggcccctctgtccctcggcatcgaaaccgccggcggcgtgatgacgaagatcatcgagcgcaactgtaagatcccgtgcaagcagtcgcagacgttcaccacgtactcggacaaccagccggcggtcacgatccaagtgtacgagggcgagcgagcgatgaccaaggacaacaacctgctgggcacgttcgacttgaccggcatcccgcccgcgccgcgcggcgtccctaagatcgacgtcaccttcgacctggacgcgaacggcatcctcaacgtgtcggccaaagagaacagcaccggccgaagcaagaacatcgtgatcaagaacgacaagggacgcctgtcgcaggccgagatcgagcgcatgctcgccgaggccgagaagtacaaggatgaggacgagaagcagaggcagcgcgtagcgtctcggaaccagctcgagtcgtacgtgttcagcgtgaagcaggcgctggacgaggccggagacaagctctcggaacaggacaagagcacggcgagggacgcgtgcgacgacgcgctcaagtggctcgacaacaacacgctagcggagcaggaggagtacgagcacaggctgaaggacgtgcagcgcgtctgctcgcccgtcatggccaagatgcacggcgcgggcgcgcagggagcgggcggtatgcctggtggcatgcctggaggaatgcctggtggcatgcctggaggaatgcctggtggcatgcctggcggcatgcctggaggaatgccaggcggtatgcccggtggctacggaggaaaccagaacagcggacccaccatagaagaagtagattaaatgaaaattgattccaatcctaatttacgagtatgtgatacaaagtattttaagactgaacctagagtgtgttagtaattaaattgctgaaacaaaattcaacagaagaaaatgtgcgtgtaaaattgtaaatgatctcctagtcaaattgtatatagaaataag

SEQ ID NO: 122 - DNA, 1953 bp, Spodoptera frugiperda
atgccagccattggaatagatctgggtaccacatactcgtgcgtcggcgtgtggcagcacggcaacgtggagatcatcgccaacgaccagggcaaccgcaccacaccatcctatgtggccttcacggacacggagcgcctcatcggagacgcagccaagaaccaggtcgccctcaaccccaacaacacggtgttcgacgccaagcgactgatcggaaggaaattcgacgaccccaagatccaggcagacatgaaacactggcccttcagggtggtcagcgactgcggcaaaccgaagatccaagtggagttcaagggggaaacgaaacggttcgcgcccgaggagatcagcagcatggtgctgacgaagatgaaggagacggcggaagcttacctcggaacgacagtacgcgacgcggtgatcacagtgccggcgtacttcaacgactctcagcgccaggccaccaaggacgcgggagccatcgccgggctgaacgtgctcaggatcatcaacgagcccacagccgctgcgctcgcgtacggcctcgacaagaacctcaagggcgagaggaacgtcctcatcttcgacctcggcggcggaacgttcgacgtgtcgatcctgaccatcgacgaaggctcgttgttcgaagtgagggcgacggcgggcgacacgcatctcggaggcgaggacttcgacaacagattggtgaaccatctcgcggacgagttcaagcgcaagtacaagaaggacatgcgcatgaatcctcgcgcactgcgccgcctccgcacagccgccgagcgcgctaagcgcacgctgtcgtccagcaccgaagccaccatcgagatcgacgcgctctacgagggaatcgacttctacactcgcgtgtcccgcgcgcgcttcgaagagctcaacgcagacctgttccgaggcaccctcgagccggtcgagaaggcgctcaaggacgccaagatggacaagagccagatccacgacgtcgtcctcgtcggaggctccaccaggatcccgaaggtgcagagtctgctgcagaacttcttctgcggcaagaagctgaacctctccatcaacccggacgaggcggtcgcgtacggcgcggccgtccaggcggccatcctgagcggcgagcaagactcgaagatccaggacgtgttgctggtggacgtggcccctctgtccctcggcatcgaaaccgccggcggcgtgatgacgaagatcatcgagcgcaactgtaagatcccgtgcaagcagtcgcagacgttcaccacgtactcggacaaccagccggcggtcacgatccaagtgtacgagggcgagcgagcgatgaccaaggacaacaacctgctgggcacgttcgacttgaccggcatcccgcccgcgccgcgcggcgtccctaagatcgacgtcaccttcgacctggacgcgaacggcatcctcaacgtgtcggccaaagagaacagcaccggccgaagcaagaacatcgtgatcaagaacgacaagggacgcctgtcgcaggccgagatcgagcgcatgctcgccgaggccgagaagtacaaggatgaggacgagaagcagaggcagcgcgtagcgtctcggaaccagctcgagtcgtacgtgttcagcgtgaagcaggcgctggacgaggccggagacaagctctcggaacaggacaagagcacggcgagggacgcgtgcgacgacgcgctcaagtggctcgacaacaacacgctggcggagcaggaggagtacgagcacaagctgaaggacgtgcagcgcgtctgctcgcccgtcatggccaagatgcacggcgcgggcgcgcagggagcggccggtatgcctggcggcatgcccggaggtatgcctggtggcatgcccggaggaatgcctggtggttacggaggaaaccagaacagcggacccaccatagaagaagtagat

SEQ ID NO: 123 - DNA, 2348 bp, Spodoptera frugiperda
taagtgcacacttattgtctattttactatattttatttactggaataatttaatctttatatttttaatttcttttgtaattttgcaaattctttgtgttgctatgagacttggaggcgggaagtattttcattaatttttgttgtatagctgtgtgaattactattcataattaaattgaataatccacgttgtcatacagtaatgattttagtgaatataaaacattataatatggcacgtgagtaaatcaccgtctttgttcatcttgaaagaaccacgtggtgactaaagcagatggcagccaaagcaccagctgtaggtatcgacttgggtaccacttactcatgcgtgggagttttccagcatggtaaggtggagatcatcgccaacgaccagggcaacaggaccacgccctcctatgtcgcgttcacagacaccgagcgtctcatcggtgatgccgccaagaaccaggtggcgatgaaccccaacaacaccatcttcgatgctaaacgtctcattggccgtaaattcgaagatgccacagttcaagcagacatgaaacactggcctttcgaggttgtcagtgatggtggcaagcctaagatcaaggtctcatacaagggcgaagacaaaactttcttccctgaagaagttagctcaatggtgctcacaaaaatgaaggaaacagccgaggcctaccttggcaaaacggtgcagaatgcagttattacggttccagcgtacttcaacgactcccaaagacaagccacaaaagatgcgggtaccatctctggcttgaacgttctccgtattatcaatgaaccgactgctgctgcgattgcgtacggccttgacaagaagggtagtggagaacgtaacgtattgattttcgatctcggtggcggtaccttcgatgtgtccattctgaccatcgaggatggtatcttcgaagtaaaatccaccgctggtgacactcacttgggaggagaggacttcgacaaccgtatggtgaaccacttcgtgcaggaattcaagaggaagtacaagaaggacctcgccaccaacaagagggcccttcggcgattgcgtactgcttgtgaaagggcgaagagaacgctctcttcatctacacaggctagcattgaaatcgattctctctttgagggcattgatttctacacatccatcaccagagctcgtttcgaggaactgaacgctgacctgttcaggtccaccatggagcctgttgagaagtctcttcgtgacgcgaagatggacaagtcacaaatccacgacatcgtacttgtaggtggttctactcgtattcccaaggtgcagaagctccttcaagacttcttcaatggaaaggagcttaacaaatccattaaccccgacgaggctgtagcatacggtgccgctgtacaggccgccattttgcacggtgacaagtctgaggaggtccaggacctgttgctgctcgacgtgacgccgctgtctctcggtatcgagaccgctggtggtgtcatgaccactctcatcaagcgcaacactactattcccaccaagcagacccagactttcacaacctactccgacaaccagcccggagtactcatccaggtattcgagggtgagcgcgcaatgaccaaggataacaacttgctcggaaaattcgagctcactggtatcccccctgcgccccgtggcgtgcctcagatcgaggtcaccttcgacatcgatgctaacggaatccttaacgtatctgccgtcgagaagtctaccaacaaagagaacaagattaccattaccaacgacaagggccgtctttcaaaggaggagattgagcgtatggttaacgaggccgagaagtacaggactgaagacgagaagcagaaggagaccattcaggctaagaatgccttggaatcttactgcttcaacatgaagtccaccatggaggacgagaagctcaaggacaaaatctcagactccgacaagcagacaatcctggacaagtgcaacgacaccatcaaatggctcgactccaaccagctggctgacaaggaggaatatgagcacaagcaaaaggaactggaaggtatctgcaatcccatcattaccaagatgtaccagggagcgggtggtatgcctggcggtatgcccggaggcatgcctggattccctggtggcgcacccggtgccggaggcgctgctcccggtggcggtgccggacctaccatcgaagaggtagattaaacaaacattccaacaattcacagcatgcttttactgatgttgcagtattcaactacagtacagtgtctccaataaatgattgaaactc

SEQ ID NO: 124 - DNA, 2792 bp, Spodoptera frugiperda
attttggttggttgctcagggacagggagttatttatttttactctgacaaccggtaaatataataatttcaatacctattctcgttgaagcagcttagagcaattttccttgtgttgtcttgtaaacaaatacttcagaagagttcgttgacaaaatgatggacggaaatgtagtgcatcctcacccgggagtggtgccgggtggcatcccaggcgtggtacatggcatggcggtgcatggtgcaggtcctgatggcgagcatgctcctcacggaccgcgccgccgctaccaaaacaggcccaagcctccaagcaacttggagcgcttgcctctggatgaagctgctaaacgggaaatggaatctcttccgttgaagacacctgtgtctgtgcttcaagaactacttgctcgtcgaggaactgtgcccaaatatgaactggtgcagattgagggcatgattcacgaacccaccttccgctaccgtgtgacagtcgctgatcttgttgctatgggtacgggacgctctaagaaggaagctaagcattccgcagctaaggctctactcgacaaacttaccggagctgctccggctgatcagtctactaatggcaatgtgcctgagactggaactgtggtgtcgtcatttgaagataaattgatgggcaatcccgttggatggctgcaagagctgtgcatgtctagattctggccgccaccttcttaccatgctgagaacgatgataatgttaataggcgtttgccgcatgaacgccagttcaccattgtgtgcactctgctgaagcgtcgtgaagtgggaactggcaagtctaagaaacttgctaagcgtcaggctgcttacaagatgtggcaagctctgcaggacaacccaccagaatcattccaacccgaggaagaggtaacacctcttaacaacaaggacttcaactttgtgcaattcttgcaagaaattgcatctgagcaatcatttgaagttacttatgtggatattgaagaaaagtccatgattggtcgttgccagtgccttgtccagctatccacattgccagtggctgtttgctatggctcaggacttactagcaaggatgcacagtcatctgcagcccagaatgctttggagtatctgaagattatgactaaaaagtgaatgtctcactatcttgcgacatcaacgccactagcttggtgaacctcatcacgcatattaattttaataagttatttgaacaaataacttcttgtgatggacacctggcttttaagctggtgattgatgtcgttaggttttgagcctatacttatctttatcaccacttcccatttgaatatggcattatgcctgtgtgccaatagcacttcgggctatgctttataactggcatgtttgcagtatcttacttgtgattcttttcaccaattttttttccatttgctcctcttcttcatcttatctttgcattattttttcttattaataatctttaagtttatttttaatccttattctaccatcggcaagtgacttttcacttgtactattactgccaacgtgcgaggataaatggcatagcccgtaaatttaaatgaaacaaagtatggagtggttacataacaaatacaagctatactttgcatagaattagtgtaattttcccagcgtggaaattacttaaaaaaatataaaaaaatacaaaaaaaaaatataaataataaaatgtaaaaaaaaaatacgtgtggatatttccagtttaatattcagcattatttaggcatgatttttgcattcatattaataaaatgtatacttatcaaacaaaagttgaagtcttagcttttaatgtatattataatcatggcatagccagtcatattttttcattttgttaaaccagatatatacttatttacataaaaattagttaagtgtcgtgtgtttaagcagttatttaacatgctgagcattaaacggaaaaaaatattctcagctagtaatgtcttgttgacgaactgcccgacctttgctttgtaccaagctccaacattgcggttaacttgaacctaaaatgaattgttttgaaacgcaagggttggaatttgtggatgaatcatgtgaggcaggattgcagagtgattttatttgaatttgaaccagtgattctaggttttcttttgaatacaagatggttaactttgcagggaagctgagaactacgtgctagagtgaatttatcactggaattagtggttgcgaagttaggatcccttgcctgtgaaaatgggcattattttaatgcaaagtatagaggttgtaacatttctaactgtacagtgtcgtcgtcggtgctttgccttgtatgccaggcaatgacgaggatcctgcacgcacccagtttcttttaaattgaatggtgtgagttcaacctgcccttgtaaaacatcgcactgttcaagttagaaaagactattcgagtaaaggattggagttccgttcaaccaagaccaactaaataaaattgaaatgtccgagcgtcgtggcatttaacgtaatgtattatttttatgtttagtgagtcttggttttacatgttcttgtgattaatctcaagatttaaagtaattaattatagattattgtcaactttatgacattatcacacttctcacctatttatgtgaaacagtttttttgaaactataatagactaactttaatttttgctatgaattatttctgcgctaatttaaataaatttgatgttgcttatatccaaa

SEQ ID NO: 125 - DNA, 3160 bp, Spodoptera frugiperda
ccaatatgacttttattgtaatccagttacaattagcttttaaatcattctagttcgatatttatttaatggtttcacgtatcgaactgagtttattatgaaaataagcaccggaatctgccgcgccggataccggcatgtggtgtagccattttgagagcggcggccgccatgtcacagaagtgaacactagatcacgaagttgataacccgtgaaattttaattgatttagtgcattgaaatactgtttttgcgatcggagctattgagaaatatttttgaagaattcgagtctagttttagtaggatctaaagtaactttgtggtctcgtgggagtggtgataccaatacgatcttgtgatagctatcatgtatgttcttaggactgggatggacggaaatgtagtgcatcctcacccgggagtggtgccgggtggcatcccaggcgtggtacatggcatggcggtgcatggtgcaggtcctgatggcgagcatgctcctcacggaccgcgccgccgctaccaaaacaggcccaagcctccaagcaacttggagcgcttgcctctggatgaagctgctaaacgggaaatggaatctcttccgttgaagacacctgtgtctgtgcttcaagaactacttgctcgtcgaggaactgtgcccaaatatgaactggtgcagattgagggcatgattcacgaacccaccttccgctaccgtgtgacagtcgctgatcttgttgctatgggtacgggacgctctaagaaggaagctaagcattccgcagctaaggctctactcgacaaacttaccggagctgctccggctgatcagtctactaatggcaatgtgcctgagactggaactgtggtgtcgtcatttgaagataaattgatgggcaatcccgttggatggctgcaagagctgtgcatgtctagattctggccgccaccttcttaccatgctgagaacgatgataatgttaataggcgtttgccgcatgaacgccagttcaccattgtgtgcactctgctgaagcgtcgtgaagtgggaactggcaagtctaagaaacttgctaagcgtcaggctgcttacaagatgtggcaagctctgcaggacaacccaccagaatcattccaacccgaggaagagggcggagtcgcggcccgttatgccgacttgaaagatagtaaaatctccaccttgactacaagtcacagccacaaggtgtcgcagtttcacaaacatctcaaacaatctgttggccctaacctggccaagttgcaggtaacacctcttaacaacaaggacttcaactttgtgcaattcttgcaagaaattgcatctgagcaatcatttgaagttacttatgtggatattgaagaaaagtccatgattggtcgttgccagtgccttgtccagctatccacattgccagtggctgtttgctatggctcaggacttactagcaaggatgcacagtcatctgcagcccagaatgctttggagtatctgaagattatgactaaaaagtgaatgtctcactatcttgcgacatcaacgccactagcttggtgaacctcatcacgcatattaattttaataagttatttgaacaaataacttcttgtgatggacacctggcttttaagctggtgattgatgtcgttaggttttgagcctatacttatctttatcaccacttcccatttgaatatggcattatgcctgtgtgccaatagcacttcgggctatgctttataactggcatgtttgcagtatcttacttgtgattcttttcaccaattttttttccatttgctcctcttcttcatcttatctttgcattattttttcttattaataatctttaagtttatttttaatccttattctaccatcggcaagtgacttttcacttgtactattactgccaacgtgcgaggataaatggcatagcccgtaaatttaaatgaaacaaagtatggagtggttacataacaaatacaagctatactttgcatagaattagtgtaattttcccagcgtggaaattacttaaaaaaatataaaaaaatacaaaaaaaaaatataaataataaaatgtaaaaaaaaaatacgtgtggatatttccagtttaatattcagcattatttaggcatgatttttgcattcatattaataaaatgtatacttatcaaacaaaagttgaagtcttagcttttaatgtatattataatcatggcatagccagtcatattttttcattttgttaaaccagatatatacttatttacataaaaattagttaagtgtcgtgtgtttaagcagttatttaacatgctgagcattaaacggaaaaaaatattctcagctagtaatgtcttgttgacgaactgcccgacctttgctttgtaccaagctccaacattgcggttaacttgaacctaaaatgaattgttttgaaacgcaagggttggaatttgtggatgaatcatgtgaggcaggattgcagagtgattttatttgaatttgaaccagtgattctaggttttcttttgaatacaagatggttaactttgcagggaagctgagaactacgtgctagagtgaatttatcactggaattagtggttgcgaagttaggatcccttgcctgtgaaaatgggcattattttaatgcaaagtatagaggttgtaacatttctaactgtacagtgtcgtcgtcggtgctttgccttgtatgccaggcaatgacgaggatcctgcacgcacccagtttcttttaaattgaatggtgtgagttcaacctgcccttgtaaaacatcgcactgttcaagttagaaaagactattcgagtaaaggattggagttccgttcaaccaagaccaactaaataaaattgaaatgtccgagcgtcgtggcatttaacgtaatgtattatttttatgtttagtgagtcttggttttacatgttcttgtgattaatctcaagatttaaagtaattaattatagattattgtcaactttatgacattatcacacttctcacctatttatgtgaaacagtttttttgaaactataatagactaactttaatttttgctatgaattatttctgcgctaatttaaataaatttgatgttgcttatatccaaa

SEQ ID NO: 126 - DNA, 1058 bp, Spodoptera frugiperda
attttggttggttgctcagggacagggagttatttatttttactctgacaaccggtaaatataataatttcaatacctattctcgttgaagcagcttagagcaattttccttgtgttgtcttgtaaacaaatacttcagaagagttcgttgacaaaatgatggacggaaatgtagtgcatcctcacccgggagtggtgccgggtggcatcccaggcgtggtacatggcatggcggtgcatggtgcaggtcctgatggcgagcatgctcctcacggaccgcgccgccgctaccaaaacaggcccaagcctccaagcaacttggagcgcttgcctctggatgaagctgctaaacgggaaatggaatctcttccgttgaagacacctgtgtctgtgcttcaagaactacttgctcgtcgaggaactgtgcccaaatatgaactggtgcagattgagggcatgattcacgaacccaccttccgctaccgtgtgacagtcgctgatcttgttgctatgggtacgggacgctctaagaaggaagctaagcattccgcagctaaggctctactcgacaaacttaccggagctgctccggctgatcagtctactaatggcaatgtgcctgagactggaactgtggtgtcgtcatttgaagataaattgatgggcaatcccgttggatggctgcaagagctgtgcatgtctagattctggccgccaccttcttaccatgctgagaacgatgataatgttaataggcgtttgccgcatgaacgccagttcaccattgtgtgcactctgctgaagcgtcgtgaagtgggaactggcaagtctaagaaacttgctaagcgtcaggctgcttacaagatgtggcaagctctgcaggacaacccaccagaatcattccaacccgaggaagaggtatatttttgtcccaatttgattgaataaaacaagtgccttgtataatatacatattaactaccaaagttactgatttgtgccaaagaaataacatgattgtgaataataattgcatttactaaatattttttgactgt

SEQ ID NO: 127 - DNA, 3180 bp, Spodoptera frugiperda
aagatctccaatatgacttttattgtaatccagttacaattagcttttaaatcattctagttcgatatttatttaatggtttcacgtatcgaactgagtttattatgaaaataagcaccggaatctgccgcgccggataccggcatgtggtgtagccattttgagagcggcggccgccatgtcacagaagtgaacactagatcacgaagttgataacccgtgaaattttaattgatttagtgcattgaaatactgtttttgcgatcggagctattgagaaatatttttgaagaattcgagtctagttttagtaggatctaaagtaactttatggtctcgtgggagtggtgataccaatacgatcttgtgatagctatcatgtatgttcttaggactgggatggacggaaatgtagtgcatcctcacccgggagtggtgccgggtggcatcccaggcgtggtacacggcatggcggtgcatggtgcaggccctgatggcgagcatgctccacacggaccgcgccgccgctaccaaaacaggcccaagcctccaagcaacttggagcgcttgcctctggatgaagctgctaaacgggaaatggaatctcttccgttgaagacacctgtgtctgtgcttcaagaactacttgctcgtcgaggaactgtgcccaagtatgaactggtgcagattgagggcatgattcacgaacccaccttccgctaccgtgtgacagtcgctgatcttgttgatgtaattacagctatgggtacgggacgctctaagaaggaagctaagcattccgcagctaaggctctactcgacaaacttaccggagctgctccggctgatcagtctactaatggcaatgtgcctgagactggaactgtggtgtcgtcatttgaagataaattgatgggcaatcctgttggatggctgcaagagctgtgcatgtctagattctggccgccaccttcttaccatgctgagaacgatgataatgttaataggcgtttgccgcatgaacgccagttcaccattgtgtgcactctgctgaagcgtcgtgaagtgggaactggcaagtctaagaaacttgctaagcgtcaggctgcttacaagatgtggcaagctctgcaggacaacccaccagaatcattccaacccgaggaagagggcggagtcgcggcccgttatgccgacttgaaagatagtaaaatctccaccttgactacaagtcacagccacaaggtgtcgcagtttcacaaacatctcaaacaatctgttggccctaacctggccaagttgcaggtaacacctcttaacaacaaggacttcaactttgtgcaattcttgcaagaaattgcatctgagcaatcatttgaagttacttatgtggatattgaagaaaagtccatgattggtcgttgccagtgccttgtccagctatccacattgccagtggctgtttgctatggctcaggacttactagcaaggatgcacagtcatctgcagcccagaatgctttggagtatctgaagattatgactaaaaagtgaatgtctcactatcttgcgacatcaacgccactagcttggtgaacctcatcacgcatattaattttaataagttatttgaacaaataacttcttgtgatggacacctggcttttaagctggtgattgatgtcgttaggttttgagcctatacttatctttatcaccacttcccatttgaatatggcattatgcctgtgtgccaatagcacttcgggctatgctttataactggcatgtttgcagtatcttacttgtgattcttttcaccaatttttttttccatttgctcctcttcttcatcttatctttgcattatttttttcttattaataatctttaagtttatttttaatccttattctaccatcggcaagtgacttttcacttgtactattactgccaacgtgcgaggataaatggcatagcccgtaaatttaaatgaaacaaagtatggagtggttacataacaaatacaagctatactttgcatagaattagtgtaattttcccagcgtggaaattacttaaaaaaatatataaaaaaatacaaaaaaaaatataaaataataaaatgtaaaaaaaaaaatacgtgtggatatttccagtttaatattcagcattatttaggcatgatttttgcattcatattaataaaatgtatacttatcaaacaaaagttgaagtcttagcttttaatgtatattataatcatggcatagccagtcatattttttcattttgttaaaccagatatatacttatttacataaaaattagttaagtgtcgtgtgtttaagcagttatttaacatgctgagcattaaacggaaaaaaatattctcagctagtaatgtcttgttgacgaactgcccgacctttgctttgtaccaagctccaacattgcggttaacttgaacctaaaatgaattgttttgaaacgcaagggttggaatttgtggatgaatcatgtgaggcaggattgcagagtgattttatttgaatttgaaccagtgattctaggttttcttttgaatacaagatggttaactttgcagggaagctgagaactacgtgctagagtgaatttatcactggaattagtggttgcgaagttaggatcccttgcctgtgaaaatgggcattattttaatgcaaagtatagaggttgtaacatttctaactgtacagtgtcgtcgtcggtgctttgccttgtatgccaggcaatgacgaggatcctgcacgcacccagtttcttttaaattgaatggtgtgagttcaacctgcccttgtaaaacatcgcactgttcaagttagaaaagactattcgagtaaaggattggagttccgttcaaccaagaccaactaaataaaattgaaatgtccgagcgtcgtggcatttaacgtaatgtattatttttatgtttagtgagtcttggttttacatgttcttgtgattaatctcaagatttaaagtaattatagattattgtcaactttatgacattatcacacttctcacctatttatgtgaaacagtttttttgaaactataatagactaactttaatttttgctatgaattatttctgcgctaatttaaataaatttgatgttgcttatatccaaa

SEQ ID NO: 128 - DNA, 2486 bp, Spodoptera frugiperda
tgaatttgtatttgtatttggaaaattgaccggaactttttgtatccgccattaggcttgttgttagattctttgacaggtctaattgattatcgagtgctttctttgaaaagctcgacatggagtcccaaaacatgaccatgatgcactcggccggaccgattcagcccccaccaagggaagggggcggcccccatcccaacagaaggggtaaccgcaaggggcacggaccacttcacggaaatctaccgacagagaggttatccttgggggaagaagccaaattgctctactctcaagaaatggcctccatgccgagcaagactcccgtcagcgtcctccaggagttgctgagccgtcgcggcatcactcccaaatacgaactggtccaaatcgagggcgccatccacgagccaatcttccgctaccgcgtgttccttaacaacgatctggtggccaccggaaccggaagatcgaagaaagacgccaaacattcggcagccaagaacttgctggatctcttggtcggaaaagtgactcccgaacaagccaatcagaccaacggaacgcccggagcggctgatatcaccaatcaggtggtgacatcgttcgatgacaaagtgatgggcaatcccattggctggctccaagagatgtgcatgtcccgcagatggccaccaccattctatgaaatggaacacgaagagggactaccacacgaaaggcagttcaccatcgcttgtcatgtgttgaaattccgcgaaattggcactggcaagtcaaagaagctagccaagagaatggcggctcacaagatgtggcaatccttgcaggatttacccgtggagggtaacaatctgccttctacatttgcgagtgacgaagagttggccactaaactgggcagctcggctgagaatcggtattcgggactgaaagacactaagattaccaagttgggcaaccagcagtcccacaaagtttcacagttccacaaaacgctgaaaaattccgtcggcaagaagttggccgatttgcagactctcagcttcaacgccaaggacttcaactttgttcagttcttgcaggagatcgctagcgaacaatccttcgaggtaacctacgtggacatcgaagaaaaaacattgaccaatcgccaccaatgcttggtgcagctatccactttgccagtggccgtctgctacggaacaggcaaaactccgaaggaagccaagggctcggctgctcatcatgccctcgagtacctcaaaatcatgaccaaaaagtgaacagctatcgatacacagtcatagatccaatcctataattatccatttcctgtaattctggtttctctatagttttgtcatacgtttttgaggcagcaaatttctcaagggcacacggcaacaaaaagtgataatggatacaaatttgactactgtatagctttcttctcttggtgaacacatactttattcgtcatcgctccccacgagcgtttctttagtctgtatattttcttgtatcacttattgcgtctttgctttggtcactttacgcgcgaaaaccattatgttttactaatttttcaataaagtacactttatttaagaacaggggagaaaagtcacgagaatttgaaaagcgagcttcatgatcccctgaagaatatatcttgaagaactattattttttttttaatttttcatcacagtgatgtttgtttcagaacaaaccgggaaaagtattatgagaatatgaaatttaaaagaaaatttgaaaagtatcatgagttttgtgattctccgaagaatatgtctcgaaagactttgactttttactatttttgtatgcacaaaattcgttctacatatgaaacatgtcagttatatattcacctttatatatgtcacattttgtggttctttaacgaaatgtcaagagcataaagtatgtctagaacgattttacctttgcgcgaaaagtgaccacaagcaatgtcaaagagaaggatagcaactaattttacaagctatactttgcatagaattagtggtttttttctaaaatcaatttacatattatttttgacttgaataaatttttaaatttaaaaatgcgtgtgtgcaggtatatttatcacatcattcgtcgtgtaccacatctcggatcttgctactaatattcgattcgataggtgctttgtctggttaactttagtgggaaggtttaggtatttgtggtatctgtcgatgttgccagaacgtaagatatcctaaactcacttttttccgaaaaaatatcgcaatagctcaaaagggaacaatttttatcgagttattgatttcgaggaataatacgaacttccatagattcaaatgaagtaaacaacatacgttttatatttaaaatgaactcacatatgcaatgcattcaacattccatagattcagtgaaaacacgccatcgggttctattttgcg

SEQ ID NO: 129 - DNA, 2507 bp, Spodoptera frugiperda
aaaattgaccggaactttttgtatccgccattaggcttgttgttagattctttgacaggtctaattgattatcgagtgctttctttgaaaagctcgacatggagtcccaaaacatgaccatgatgcactcggccggaccgattcagcccccaccaagggaagggggcggcccccatcccaacagaaggggtaaccgcaaggggcacggaccacttcacggaaatctaccgacagagaggttatccttgggggaagaagccaaattggtaagtctctactctcaagaaatggcctccatgccgagcaagactcccgtcagcgtcctccaggagttgctgagccgtcgcggcatcactcccaaatacgaactggtccaaatcgagggcgccatccacgagccaatcttccgctaccgcgtgttccttaacaacgatctggtggccaccggaaccggaagatcgaagaaagacgccaaacattcggcagccaagaacttgctggatctcttggtcggaaaagtaacgcccgaacaagccaatcagaccaacggaacgcccggagcggctgatatcaccaatcaggtggtgacatcgttcgatgacaaagtgatgggcaatcccattggctggctccaagagatgtgcatgtcccgcagatggccaccaccattctatgaaatggaacacgaagagggactaccacacgaaaggcagttcaccatcgcttgtcatgtgttgaaattccgcgaaattggcactggcaagtcaaagaagctagccaagagaatggcggctcacaagatgtggcaatccttgcaggatttacccgtggagggtaacaatctgccttctacatttgcgagtgacgaagagttggccactaaactgggcagctcggctgagaatcggtattcgggactgaaagacactaagattaccaagttgggcaaccagcagtcccacaaagtttcacagttccacaaaacgctgaaaaattccgtcggcaagaagttggccgatttgcagactctcagcttcaacgccaaggacttcaactttgttcagttcttgcaggagatcgctagcgaacaatccttcgaggtaacctacgtggacatcgaagaaaaaacattgaccaatcgccaccaatgcttggtgcagctatccactttgccagtggccgtctgctacggaacaggcaaaactccgaaggaagccaagggctcggctgctcatcatgccctcgagtacctcaaaatcatgaccaaaaagtgaacagctatcgatacacagtcatagatccaatcctataattatccatttcctgtaattctggtttctctatagttttgtcatacgtttttgaggcagcaaatttctcaagggcacacggcaacaaaaagtgataatggatacaaatttgactactgtatagctttcttctcttggtgaacacatactttattcgtcatcgctccccacgagcgtttctttagtctgtatattttcttgtatcacttattgcgtctttgctttggtcactttacgcgcgaaaaccattatgttttactaatttttcaataaagtacactttatttaagaacaggggagaaaagtcacgagaatttgaaaagcgagcttcatgatcccctgaagaatatatcttgaagaactattattttttttaatttttcatcactgatgtttgtttcagaacaaaccgagaaaagtattatgagaatatgaaatttaaaagaaaatttgaaaagtatcatgagttttgtgattctccgaagagtatgtctcgaaagacttcgactttttactatttttgtatgcacaaaattcgttctacatatgaaacatgtcagttatatattcacctttatatgtcacattttgtggttctttaacgaaatgtcaagagcataaagtatgtctagaacgattttacctttgcgcgaaaagtgaccacaagcaatgtcaaagagaaggatagcaactaattttacaagctatactttgcatagaattagtggtttttttctaaaatcaatttacatattatttttgacttgaataaatttttaaatttaaaaatgcgtgtgtgcaggtatatttatcacatcattcgtcgtgtaccacatctcggatcttgctactaatattcgattcgataggtgctttgtctggttaactttagtgggaaggtttaggtatttgtggtatctgtcgatgttgccagaacgtaagatatcctaaactcacttttttccgaaaaaatatcgcaatagctcaaaagggaacaatttttgtcgagttattgatttcgaggaataatacgaacttccatagattcaaatgaagtaaacaacatacgtttttcatttaaaatgaactcacatatgcaacgcattcaacattccatagattcagtgaaaacacgccatcgggttctattttgcgctaaggccttcacctcattccaagagtttccttaacttctta

SEQ ID NO: 130 - DNA, 2486 bp, Spodoptera frugiperda; identical to SEQ ID NO: 128

SEQ ID NO: 131 - DNA, 1838 bp, Spodoptera frugiperda
ttttggttacattgtgatgtcgtcgtcgagtatcgagtgtcgtcgtcttttgtagaattttatcgaggtaatgtttatttatgaattttacgtattttatttttatatttaatacgtatgagttgtaattgttactgtacaacttctttggtaattaaagatactaataactacttgtcacttaaatatttcttggcggccatattaaaattcgaagataaaactacgacttcattttatcctgtgtaatctctttgatcttgttccgtttatgtttaaatacacagtagaacaaaattaaatgacatcccctttgttctttacttattagttctatgagatatccccggactaagttggtgaacgtgataaacttctaaatagcttatgtgtcgaaaagtgacttatcgtaaaatttatttagtgttggacttggacaaagaattgtgattctaagtttctaattttagtcgtgtccctagtgggattatttggcaaaatgatgaccgaaaatagaattagttcaagtaatcacgtcggaaacagtatgaccagtcagaataagggtgatgtcgataaaagtatcgatgacatcggttggaaatcaaaattaaaaatacccccgaaagacaggagaataaagactagtgatgtaacagacacaagaggtaatgagtttgaagagttttgcctaaaacgtgagctgctgatgggcatttttgagaaaggatgggaaaaaccttctcctattcaagaggcttctattcctatcgcactcagtggtaaagatgtcctcgcaagagctaaaaatggaactggcaaaactggcgcttattgtattccagttttagaacaggtggatcccaaaaaagatgctatccaagctttaattgtggtaccaactagggagttagcgctccagacatcacaaatttgcattgaactggcaaagcacacagatattcgcgtaatggttactactggaggtactaatctccgggatgacattatgcgtatttatcaaaatgttcaagttattattgctacgccgggtcgtatgattgatctcatggataaacaagttgccaagatggaccagtgcaggatgctggtacttgatgaggcagataaacttctttctcaagactttaaaggaatgttggatatggttatttcacgattgcccaaagaacgccagatcttgctgttctctgcaaccttcccactgagtgtgaagcaattcatggaaaaacacttacgagaaccatatgagattaatctcatggaggaattaacactgaagggagttacacagtactatgcatttgtacaagagagacagaaagttcattgtttaaatacacttttttctaagttgcaaataaaccagtctataatattctgtaattcaactcagcgtgtagagctacttgcaaagaaaataactgaactaggatactgctgttactacattcacgcgcgtatggcgcaagcacatcgtaatcgtgtgttccacgatttccgagcgggactctgccgcaatcttgtgtgctctgacctgttcactagaggtatcgacgtgcaagctgtcaacgtcgtcatcaactttgatttcccacgtatggctgaaacctacctacatcgcatcggtcgttcagggcgtttcggccacttgggtattgctatcaacctaatcacgtatgaggatcgttttgctctgcatcgcattgagcaagagctgggtacggagatcaagccgatcccgaaggtgatcgacccggcgctatacgtagcgcgcccggacgacgatgactcggccgacaagtaacgccgtgccg

SEQ ID NO: 132 - DNA, 4001 bp, Spodoptera frugiperda
tcgagcatacaattggcaacactgttttggttacattgtgatgtcgtcgtcgagtatcgagtgtcgtcgtcttttgtagaattttatcgagatatccccggactaagttggtgaacgtgataaacttctaaatagcttatgtgtcgaaaagtgacttatcgtaaaatttatttagtgttggacttggacaaagaattgtgattctaagtttctaattttagtcgtgtccctagtgggattatttggcaaaatgatgaccgaaaatagaattagttcaagtaatcacgtcggaaacagtatgaccagtcagaataagggtgatgtcgataaaagtatcgatgacatcggttggaaatcaaaattaaaaatacccccgaaagacaggagaataaagactagtgatgtaacagacacaagaggtaatgagtttgaagagttttgcctaaaacgtgagctgctgatgggcatttttgagaaaggatgggaaaaaccttctcctattcaagaggcttctattcctatcgcactcagtggtaaagatgtcctcgcaagagctaaaaatggaactggcaaaactggcgcttattgtattccagttttagaacaggtggatcccaaaaaagatgctatccaagctttaattgtggtaccaactagggagttagcgctccagacatcacaaatttgcattgaactggcaaagcacacagatattcgcgtaatggttactactggaggtactaatctccgggatgacattatgcgtatttatcaaaatgttcaagttattattgctacgccgggtcgtatgattgatctcatggataaacaagttgccaagatggaccagtgcaggatgctggtacttgatgaggcagataaacttctttctcaagactttaaaggaatgttggatatggttatttcacgattgcccaaagaacgccagatcttgctgttctctgcaaccttcccactgagtgtgaagcaattcatggaaaaacacttacgagaaccatatgagattaatctcatggaggaattaacactgaagggagttacacagtactatgcatttgtacaagagagacagaaagttcattgtttaaatacacttttttctaagttgcaaataaaccagtctataatattctgtaattcaactcagcgtgtagagctacttgcaaagaaaataactgaactaggatactgctgttactacattcacgcgcgtatggcgcaagcacatcgtaatcgtgtgttccacgatttccgagcgggactctgccgcaatcttgtgtgctctgacctgttcactagaggtatcgacgtgcaagctgtcaacgtcgtcatcaactttgatttcccacgtatggctgaaacctacctacatcgcatcggtcgttcagggcgtttcggccacttgggtattgctatcaacctaatcacgtatgaggatcgttttgctctgcatcgcattgagcaagagctgggtacggagatcaagccgatcccgaaggtgatcgacccggcgctatacgtagcgcgcccggacgacgatgactcggccgacaagtaacgccgtgccgtcgtcgcaccgctcgcgcacttgcccgctgcgcgtgccccatctaactggacttgctgactggtgaaaggaactacatagtttaaatctttaaaaacaaaaacttatttgtaaaaaagtgtaatgaatttattgtaacaaaatgtgagtgtaaatagtttatcgtgagtaagactttgacctgaaatgggttacttttttaaagtgtaaataaaccacacatcaggacataaacaaaaaggtatcttgtgtactttgtccatattggatattgtgtgcgaattcctacattgttaaaatataaaaaatatttatttgagcatcatctttgagagtctacctagatttgtccagcatcttaacataaattgtggttgactttctgttgatatcatgagtgcctatccacagtatatgtatataagtttgagctagcaccagttttattttcaatcaaaataacttttaaattctgtaaggtgggtaggtaactagactagctcaaacaacatctattgttaaagaagaaacatttcagtgtatatcatgttgtttctggccgcttgaaacaatatttgtcaacaagccacatttataaaaggaaggtcatgatgatacaaaccccttcagacaaaacttaactgatctcaaacgagtataatcaaaaaatattttttcagttttattttgatctgggtgtagtatcattttgacctagctttgaagaatttttatcatgtcaatgattatattttatttttaagcggttctgtcacagagttcagtaatttacagtttaaaatataggtctggaggatattgactaaagataaataatttaaagtggccatattatcatctcaatcacaactcaatggcaattaataatacacagtaatgtgtttttatctttatcggtgctccaggcttatctggtatttaagtcaacattattttataaaacataatatttgcaagagctgtgacacaatgaggaataaaccattctgttgtggtttgcagaaatggcgtgttgctcattttggggaacattttagagggcttcgtgtaaataaacgatatcaccatctgctctcagggggaaaaaatgattcgggatgtcaagtgaagagttatttggtcaacaggccttaccaaaagtatagagtacaaccagaatttgtcgaatcttttaagtttgtctaaataaatctgttggtactcaatacaggacatctcttataatatatatactactgtcaatttacatatttgtttggaagcctactttttaatgaattagattacttaattttgcaaggaaatgaaaaaattgaaacatcataattgtaatttgtgttttcggagttttagaatttgttacaaatcttattttattagcctgttatatttgacctataagaagtgttagcgcaaattacaggttgtaaaattaagaatagaccaaattgagaattgtaaagattgctttgctgattgtatttagaataaggattgttttggaaagtggaagcttgattcaataattggtgaaaattgcatacaaatgttgtgagtcatggaaaatgattttgacaaaatatatctgtgataaaggttatgatggtttcatggtacacccagcaacacagcgactgtatgtgtttatagttataaaatataccgaataattggatgtaattgaaaatataagcatctgtgttgctgatcgtgcgtaactgggttaagattcgtgtgtgtacctttgaactataaatttaattatttagtcttccgataatctcgaagtatgtgtaaatgtaaatgaccatttaatattacgaaactacgcaggttaataaaataaagagcaatatcctgattaatttgttactgtacacgtgtgacaacgttgattcacatttactgtcttagaaaatgataggtctcagagtattaacttgaaaagcaaattgtgtagactgaaaataaaaaatgcagttgttagtcgaaactcatgctcagtatgtgatctcttattttcattttaatatgcatgatgttttgacatgatgattataaatgacacatttttttatgcctctgacaaaccctttgtgttaaaaatatttgaatcggcgttgctgctacactagcaatcaggaaaattaaaattatgatcataaacaaaatattttgaaacccgaaatagaaagcatatcaaataagattttatatagatatttcaataaatcatgctcttatacaaaatacgagtcgaaatagtatacatcctagagtgacctatattggcagtggcatattctgtaatttaataattgtttatcttgttttatctacttcagaaatatattgttgttaaaaacgggccaaaaataaactcttcacgtca

SEQ ID NO: 133 - DNA, 1887 bp, Spodoptera frugiperda
ataggttttagacattttagtttcattaatgtaaatgaaaaagcagagaaaaagattttctatctgaaattcgtgttattaaaacattaaaataagttctaaaaggtatttggctgagaaatgtaccaagataataagaattcaatgacataattttgtttaacaatcagatcagtcaagtccatctgtgtattgggattaaacaaatattaggcttatcctacatattgtagtgtaattttgggttttataaacccagactttttatattggacagtaaatatgacagaaaccataaaatcaaacaataatcaccttatgggacttcccaacacagtggattatgacaataaggtggatgacttgggatggaaagcaaaacttaaaattcccccaaaggatcggagaattcaaacaagtgatgtaactgatacacgtggcaatgaatttgaagaattttgtttaaaaagagaactacttatgggaattttcgaaaaaggctgggagaaaccatcccctatacaggaagcctctatccctatagcactgtctggaaaagatgtacttgctagagcaaaaaatggaacaggtaagactggtgcttacagtattcctgtgttagagcaaatcgaccctaaaaaagactgtattcaagcactaattatagtaccaacgagagaattagcattacaaacttcacaaatatgcatagaactagccaaatacctagaggtacgtgttatggtgacaacaggtggaacaaacttacgagatgacattatgcgtatataccaaaaagtgcaagttatcatagcaactccagggcgtatacttgacttaatggaaaaaggagtagcagttatggaccaatgtaaaattcttgtattagatgaagctgacaaattactgtctcaagattttaagggaatgcttgacactgtgattaaaaatttaccacaagagaggcaaattttactattttctgcaactttccctttgacagttgaacaatttatgagaaagcatttacgagatccgtacgagataaatctcatggaagaacttacattaaaaggtgttacacagtattatgcatttgtccaggaaagacagaaagtgcactgtttaaatactctattttccaagttacaaattaatcaaagtattattttttgcaattctacacaacgagtagaattgctggcgaagaaaataacagaactgggttactcatgttattatatccatgcaaaaatggcacaagcacacagaaacagggtgtttcatgattttaggtctggtttatgccggaatctcgtttgttctgatctgtttacaagaggtatcgatgtacaagctgttaacgtcgtaataaattttgatttcccgaaaatggctgaaacgtatctacatcgtataggtagatctggtagatttggtcacctgggtattgcaataaatttgatcacctatgacgataggttctcccttcaccgtattgaacaagaacttggtactgaaatcaaacccattcctaaagttatcgatcctaaactatacgtaccaaaagtggatgatgaagaaatcgaaacaggaaaataataagtgtggcaaatattaatagtgtgactcgatgactcaaaatcgtgtaaatatttagaggacacaaaagcaaaactgaaaaagtaactttaatttctttttcaaagaagatattttttgttcgaatgtttatacagaatgataaatgataatatgataatttaattcatttgtgatatttattacaaaacgattgttaaattaatgctacatataaacaaatttattgattctaaattgatataaaatctttacttaatagatatattgtaatatatcaattat

SEQ ID NO: 134 - DNA, 9544 bp, Spodoptera frugiperda
aaaatcaatacaccgtgatgtattcgcctttttaaaatgagaacgtgacaaaacattaatttaattcatcgaagaaaccacttttatttaaaaaaaaatatctgttgagacttgatgctcattttttatttatttacaaagtgatgagtattctcatagttacggcgtggtagaactttctgcgcgtagattatcagcttttccttcaaattataaactgttaaaggttagtaaatcatttttaattataattaattatcgaaataattaacctatggggtttttctgccatatttggcaaaaaacgtgttaatacggattatcgaccttcgccattgtctgcatggtgcattgcgtttattgtgcgataggttcttgttgagtaaggtcaagaatatattcattatacaccaacataattgtaagttaaaatggaagaaatgaatggggatctttatgggggtggtttagttagtttgggagatgagggttctttggagtcaactgataatggaaaacaagagcaaaattgtaagatttgcgacaataagttatgcagtcctcgtgttttgtcttgccttcatgtattttgtgaagcttgcattgacaagttgatggttaatgaagctggcgattctctgaaatttgatttggctgtggaatgcccaatatgcaaacaagaaaccaagatacctggaggtggggctgcatcccttccttctgattatgtgcttaccaacattttggatgtttctgccatggatcaatctgttgtttgcacttgttgcaagagcaaggaacctgctgttgctagatgcactgattgctctcattttctgtgttccaactgcaattcagctcacgaatttatgagatgctttgaaaaccacagagtagtaccatttgatgctctaaggtcctctaaggagaaagctgccgtgcataagccaattttttgcgctcgtcatgctggggagagtctaaaattttattgttgcgagtgtgaggtcggagcttgcactgaatgtcttactgttgatcataaagtcggcgaacatcgctgtgagagaattgtcgatgtcgagccgaacctacgtgctgaattgagaaattttattgtggaagctaatgctcgcgctgctacagccggcagtgcttcagctaaacttgatgatgcacttggagatttgcaacgccagcgagatgaagccgagggcgtaattaacgaagcttttcatgcttataaagctgcattagagagatgccgtgaaaaggctcttgaagaacttgagcgtttgcataaagaaagagaactcaaggtcatggatctctttgatcgcgtcgataaaactgttcagcgcatagactgtgcttgcaaatttgcggctagattacttcgccgcggtgatggcactgaaattgtgatgttgaagaaaactgttgcctcgcaatttgctcgtttgttggaaggagcacctgaatttgatgttgattactcattggaatttgtcactaaaatagacaagtttgatgccatatctgaagaaactttcggaacattccgcacagaggcaactagggcagaagaaagaaaacgtgccagtgaatcctctgctattgtatcggtgacatcgaattctcactcacctgctgtatccgtaactaatgcgcctgtgtttgatgattatcctatcggaggcgtccgtcgagtcactggggtaactggagttggtagcatggtaggtgtgtcaggcgtgcctgctattggagtacctggtgtaggagctgtcactggagtaggtgttgctaacacaagtgtcataactggtggagtcaacattactagtggcgtcggaggtggcgttcctgcactgccatctatggtagaatataatttgcaacagctggctagtattgctgagaaagacgtgtctcctcctcctcacgcgtctccagctcccacttttactctcgctgaattacttgccggtgacctcaattcccctcaagcttacaacaacctgcaagccctcgctaaattggggttgaatgaagtgaatggctttggaggtgttggaggaattggcgatgtgggtcctcgcggtgtatctccaggaagacctttgctgacggctgcggaagaggccgctctggtacctcccccagctccacttgtgcgtgccactaaagctacacccatgcatataagattcaagtttggtcaactgggaagtggcaaaggccagttcaactctcctcatgggttctgccttggaaacgacgaagatattattgttgccgatacaaataatcatcgcatcacggtgtttgataaatctggaacctacaagtttaactttggcattgccggaaaagaggaaggccagttgtggtacccgcgcaaggtagctgtcgtccgagctactggcaagttcgtcgtctgcgatcgcggcaatgaaagatctcgcatgcaaatatttactaaaaatgggcatttcttgaagaaaattgctgtacgattcattgatattgttgccggattagcagtgactgccgaaggtctcattgtggcagtagacagtgtgacacctactgtatttatattatctgaagaaggcgagctcattaggtggttcgattgcagcgagtgtatgagggagccatccgacattgctataagcggcaaggagttttacgtctgcgatttcaaagggcactgcgtagttgttttcgacatcaaagggcatttcttgcgtcgtattggatgtgagaacgtcacaaacttcccgaacggcattgacgtgtccgatgcgggcgacgttctcattggtgattcccatggcaacaagttccacgttgcagttttctcacgtgacggcgtcctcgtcactgaattcgagtgtccctacgtcaaggtgtctcgttgctgtggattgaagattacatctgaaggatatattgtcaccctggctaaaaataatcaccatgttctagtcctcaacaccctttatattgtctgaggagtaactcgatggctgtaagtctgcatactacaagatctcacatttattccctatattttatattaattgctgtttttacaaagcttaacattttttgctaaaccagtatttgactacttatttcgttattttgtgttaaatttcattttagtctgatatttacactctatccatgagcagtgaactatagtgatcctattttcagtatgcttcgtgattttttgttttattgcattctagatttagacactatatttttattcactgcaatggatagacttaagtcattattatttccaaagtactgaatacttgcgtattgtttgggtttttgttcatctgtcattattttataattgcatttagttctagtaatggaaaatccaaaggttagtatataatattcaacttctattattttcgttatagtccaataattataaattgttatatttggtcatggaggatcgaaaagtttcggatttatttaatatctggctatatattacaaatgaagcgggtatatacggacaattattatttttatgtataaaatataagcttcgaattgttatagtcgactccactcagataattatatccggaactgaaacttacatcctgccaaggaataaccataaccaaatctaactaaacaattcccatcgacaggactttattttattttctaaattttagcagctggtatggttcctagttcgagtgaagtttaaacatgtcaattaggggactgcgtgggagtgtcgcctcaaataaaatgttgatttgttcgaatgttagagcccaatatacgtaccttttgttttttatactattgatttcatgaatattggtaattttcaggataagaacaaattacatatataaacgcacaattgagtttataaaagtataaaaattagtctcgtcatgaccaaaggaggcgacaccataataacgtgccatctagtttaggttaatctcgtatacaatattatatattgtccgttaaaagtatatttaccatttacagaattcttgtgtctatacaaaatgtttttcgtgtactcttgttttgagagcctattacatatttgaaagtttttcatgagtaggcattacagtatacattgttgagaattggtttttattataagtaatatcttaataatgaaacattgtaatgcatgctgtattattagagaaccgctataagtaaccattgcaataatttttgtacaacacatacatgtaattggatagttaaaatttaatgtagaggtctggcattttcctgtatatagtgagcctttaaaatagtaatgcaagcatattttattggtgcacttgatattgttgttgaaatagtcactcgtacatatacatttattgcaataactatttactaattcaagtattatgttgtggctaggtaaagaaagcatgatagaaacatttattacttgttatgtacatgaatttgccattataaatgattctacttatatgtttgatgagtatacagttcgccaaattatatatttttataactatccacatttatattcaaaattgagaattcatagttttagatagtaggtacaaatgcggtttattgaagcgataccatatttagatatttacatcatatattacggtcccttgttagaaatttcctaaaaatagtatttaggaagtgggaagacaatttaacgtcatataaaatccctattatattaataatgtggtatcaaatttgtaatacataagtaatggtcagatacaattttacattataccataactaattccagggatccatggtcttccaaatatatttagactatttgaacgaattttatcatacttaaagaaagcagttgtttttgttctatataaatagccaatttaaatagccagttgtgcaatgattgttgtcctctactggtactgtagtaatgataggaaatatgaagtttattgtgtcaccattattaaacaaagtctataaccggatgaattgtgttgtacatgaccattattttgttttacataattaactttggaaatagtacttaaccagaccacctaaaattaagtgtgatattttaccaatattgttaatgtcagtttttaaatgctctctaattttttggttttattagtttacgttttaaaatattttaattcctcaatttccagaaagtcatgcatcttatctcattgaaaaaacaaaataataaaaacactttcatgttactaaattgtaattaaagttttaaatattaattagttgatagtcaggcactctcttcgtattgctgagccatataatttaaactgaaagttaaaatcataattgaagagtaacatgtataaatgtgtacttaattagaaataggtatttattttatgtatttgttgtgtattggaacagttttacaatattcgatacgcaaaattagatgtgatatgagcaataatagagagacataatgaaccaacattttaagacttacttgactcaatattttgaaagacacgagcaaagattgagacgtggggcgatgtagcaacgtcaatcttcagtgataagttgaattttgacatttgagtctgaatcctctattgattagtgagtaacttttgggtttatttttcatattgtttttaagttatttgtttcaggatttttgtcccaatagtattagggaattttattttctttattttaactagtttaaaatgagtctacatacccctcgcggaagagcaggtgtgattaatactctgattttgtcgttttattgttttgtttaactatatgttccgggcctatattatataaatagtatttttggccagtgtgtttaggcctttagatttacgaatttttactgccaaattattttcttacgatatttgtgcatgcacatagtaattattttattgtataatatttgtaaaaaatagttattagttgttgccaattttttgttttattaatattcagggtttaatattataatgttcaattttaattcgttgtcattgatcaaaattattgtgtgttagtgaagtaaaattaaccgaaatagaacttattattgccccaaagggagcgtttgacgctaataataatattgctttagggttgcataaaattattaaaaagtggtgtgataagttttggataattttacaaattatactattttatgtgtggattccgatattaaaattcgaagtcgtatttcattaaaacaatattatttttatcagtggttattgtactactatgtttatttcaaaagtattacctgtcaacgacccctcgattaatgttaattttggtgatattgacactttcctcttttcttgccatgtattttatgtagggatcagcgtagaaatgtttagtaggtactagtatttttcaattgatatacacacatacagtatcacaagtttgcctatatggtggtgttgtttagagatgtttattagtggttggcgcgggccgcgacggttattcgtcgcgtctgcttggctgtataatttgccgtagtgagtaagcactatgtcatggatgaatggcagtcaaatggtatctattgtccattgacattacttgataataattgtatcattagagtacattacagtagcctttctcgggaatcttaaaagttacctatatacactttaaagcaatttttggtaaagatatttctcttgaatctatattcccttatgtatccagcaataaattacttcagtagttgtgtagtatcactttatatggcactgaaaattgcagatttccttgtattatattaagctctttatgtgggacgccactcgttgttgagacgattgtgtcaaggacatttgcatacttggtgccaggtaatgtgatagtgtagggttcgcagcgcacaaggtgagctctaatgttaccctccctattggaggtgggcgtattgcctattagtggcaccaagcacagctcgacggtctgggtggagtgttgtggcgttactattcaattttgttcaactttgaaccgtgggtgggattaagattatttctatattatacctaattatttaatttcgaaatgattccaattactatttgaaagacggcatgctcaaaagatatattttatttttaccttcacccacttaaccgatataatctccactattctaaaacaacataaataataataaggttgtgagctctattcccattggaattttaagccacatgtgtgcttgtgcaataaatatcacagtttggatctaggcttttaaattattatagattatatacattgttgagctgattataaaaatttaatatattattataccttttaatattgttaaagaattctaattgcattccacatcttagagtgaacgaatttgagatgaccgttttcagtctacattatacaaattattttttttttacaattgtaggattattagcagttgccaatgttttcctttagtcagtaaaagtacaaatattttaatatacaatcttggtatttacgtattgtagtgatcttattttttgattctataactataagcataatttttttctcttaagcggccattcagatatttcttcgtctcacaaattattcagtaaacaacaaaacatatcataccgaatcaatttagtttacaaagaaattgtctgcaactcccgtgattttattctcctcattggtttagatgttgttaaaatggctattttatttgttttcaagctagatttaagtatattctaagttacactgtcttatgttcttgtcattttatgttgaaatgtgaaatttattgtaatagttagtgtgaaaggtgcaagttccaaatgcatattttaattttgatccaaagatttcattaattccttatattttaattattttattctcgttagcggaaatgacatttgtggagtatgcattggtatttgatactaggagtaacatgaattattctgtagagttggtgcagccgagcaaatctctactaatattctcttaagaatatttgctcaataatttaattctgttaaagtattttaaacctagttgtagtccaccgtgtgtttagtatggatgtggactccataacacgaaattatatctaacagacaataccctccgtaaacatttgaaagaaattaaatgttgaagttttattagatgtagttgtttgccttcacggcggcttgcagcaatgtgcaagctgcaaggggcgccagcagcatcagcacataggattgccaccggctctgaaaccattatactttactgctcatttatataataatagcacacgtacagaagctttgtccgcataggtccagttttatccgacatatctttctcaaatatgttacatagaaggttcggcagtttatataatgtcttcagtaaaccttgtgtgatggtgttgactgttatgtactatttagccccacagtcaacgaaaattgttatataatccatacaggagtctctgctgcattgtgcctagatcttagaagttaatggtatcaaggtagagttaatctcaaatattttggctctttgaatattccatgatattatttttgtttttcatgaaaatgtatttacattatatacatacacctagattattgtatacaatatgaatatacattgcgtggtttgtaacttgatgtttaattattttatcgtaaaattaagatgcccaactggttctctgtccacacctacgaagatgtggtggaattgagtgtattcgatatttaaatctatattattcaatgtaactgaagatagatgtttactgtggacaggagtagcgtttaattgttcaactggttgcacatcttactttgaccaaattcttttaccgctgaagtgacttgagaatttggatgattgccatttcgcactttcttaattatttgttctttttcttttttaactttttttgatggcgaatgcaaattttcatgtgacgttggcggtttattaataattataagtttattaacgtgaactgtggccaggataacaacagcagagcagtgtaattcagagcctgcctaaaatatatttttgtcatgattttatttaggtatatacatgttattattcacatattacagttttctcaatattagcttgtattttaattaagaaataatcatatttaacattgccaggtgatcagcaacctgcactttaatatttttggaaactattgaacttaaattgtactgactttataaatatatttacttcaataaagattttccatgccactaaatacgactttattatcaaaattatattcgcctgaaacataaacatatttttaagtacataaagtgaggacttaatatcgtattaggttgtatcttatgattaggccttgcaacttttcaataatactgttttaaaatttctgccctgttatacagttcgctcacaataacctaaa

SEQ ID NO: 135 - DNA, 80 bp, Spodoptera frugiperda
atggatattaataaactagtcagtaagaaccaatccatcaaaatagttccctccgtagaagattcattgaagtccatagg

SEQ ID NO: 136 - DNA, 2981 bp, Spodoptera frugiperda
ttaaaatgtcaaaagttggtaaaaatttatgaaggaattttaatcttaagagaaagccttttgctttagtttatttacaaactaaaagtgtgtgttatatgtatgatatgcataaagtgtaaattttacctaaaagtacaaagatttgtataaagtacaacaatgtcttaccagccagggagagtaagaggtaggggtagaggttctaacttccgtaatgttagaggaaatgatagaaaactgaacactggatatccaactgataccaacactcctagtgtttcgggtacgaacatatccaaacatgacaataactgctgctcagaaataactttttctcttgaacttgatgaattcagccaaagcttcttcacggaattaaaaaatatatggaatatgttgaagaagagccctccagttgtaagcaaacttcacatacactttaacaatacagataacccatatatacaagtattacggctgctctacaattgtcaggaatttcataatgccaaaaataaatctctaccaatgtttatcattgaagagttcaaaatttggagtacaatgaatagggataatattaaacatcttttagtaccccagactaaaactgatgcctttaaattatctttaagacaaaatactttggcgttgaataagttgcttatagatgcgtttgagatgaagcaggagcgagagatatttttgagtattattaggtgcctaattgacaagaaacagtataaagaggcttgtcaatatactacaatgctaaaccttcacgactgtttcgacattgacgatttcttaatacctctcatattacaagatagactttacggagttgatgattttttaaaaaataatccgaaacatcagacagaacttgtgaaatggatggatggaatattagcgaatacgtctgttagggagacattgggagaatatgtagcagaccgagccataccagatttaaagtataacaaaatgcatgcaaaaccttggaaaaaattaatagctagaatggtgaagatgtttaaattaccagctgatttgactcccaatttaaacagaagaagaaacgaaggtgctctaaatttcctcttgcacaagaggtatattgaaaatagttttggggatgaaagttggaaagaaatggcacaagaagctgtcggggatgaggaggagttacaaaaggaattagtttaccaggttgctcaatatggtgattttgcagaagcgcttcgatgggcgcatttttataatattgacaggaacgagtggccgcacgcagtgagaatgcttgaagaaaatccggatggcaatagggaacaacagaaaatagtacagcaggacatcatctggaatgacgacgaaatcgagcaaccgtctgaacaaatcgagtatcataaaatgacattgccaatgagtgcaatatgtttaatagacgatccattaaaatttgaaaattttttagacatggcttctcaggaggtagatataattggcatcgattgtgagtggaaacctagttttggtggtcagctaaacgagttggctttgatgcaaattgctaccaggaaaaatgtgttcatattagatattatcaatattggcaacaaatgtccacatttgtggcaagaacttggaaagttcttttttaacaattgtgatatattgaaagtaggttttagtttaactggtgatattcatatgataaggcacggtttaactggtgatattcatatgataaggcacgcattgcctaatcttaatttttctacaaatcgagtaggagtattggatctgtgttcattctggaaacatttggaaaaacatccggaagtaaaactaccatttgaagtacaaaaagggggccctagcctaagcaccttagtccattgctgtttgggttctcctctagataagtccgaccaattttccaattgggagaagaggcctttaagggacagtcaaataacatatgcagccttggatgcttattgtttgatacaatgttacgacgtgctacgtaagagctgtgaagaagttgggtttaactttgaggacgcgtgtttccaactcatgacgaatccaaaaataacgaagaaaatgaacaagaaaactgtaaaaaagaaggaagcggctaaacccaaagaagaactcattcagcctccgtctcctcatagtgaccaagtacctgccgaacaaatgaaagtcgtctgtgatacaatgctgcaaggtcttggcaagaaattaaggagttgcggtatcgacactgccattctggaaaatcatcaggaccacactgagtgcgttaagtatgccatcgatgaacgaagatatatcttgacgaaaggatatgaaacattcaagctgttatctggatatgttcctaaaggacattgcttgagaataattagtgagaacgtagatgaacaaattaaagaagtgataggttattataaagttctcgttacaaaaagtcacgtcttcagtagatgccaggcttgtaatggtaacaatttcatcaaattgtcaagatcaacaatggatgctttagaaaaatcacaaacatattgtccccctcctccttgttattacgaagacgaagctacagggttttcaagtgatgatgcagatgaatattatgaggaaattccccaaaaatggacaccgtcaactggacgaaaatgggatctatatgccgatgaaaacgtggacgtaggattatgccagactcgtctaggcgccaaaattcaggtcagttctgttcccaagcctcttttacaaaaatacgactttttctacgtctgtgaggaatgtgggaaagtttattgggacggaactcattttgaccgtgtagtggctggaaggcttcaaggaattgtgcaataaaaacaatatcttttttatttaatattaaccgttgttaacaacaatattatttgaattatggttttgattaactgaaatac

SEQ ID NO: 137 - DNA, 5680 bp, Spodoptera frugiperda
aaagcagagaacaaactcataaaaaagtagaattaatgggaaaggctgtgggtttaccgaatatttgaataaaatcgtaaattatttacacatattttggtctaccatttatttatcgttgtgttaattaggttgttaagattgcgaaatcatttatataatctgaaatttaataaacattgttttgagtacgggtcacgtaagtaaaaatattttctagcacacttgcaaaacggtcagattacagtttacagtgcataatgtcaatgaatcataataatttgtttgtttgtagttaattagcttacagtgcttagccttacgaacgtaatatagcgttattcagtttgacctttttgcaagtcacaagtctcaagttgtctttgcagagaacactggaatacattagcagcgctgcccgaggtggtatcctgcgggtgtattaaagcggttttgctacagactagactctgtataaacgatcagaggctctagtctggcgcaactctgccacatctccgcggccgtagcgcacgcctttcacgcggtcacagaattaccgaaagtttacatcgagcgatggttggaatccaactgttgatacacattggattttaagttccatcgctagttgtggactatcttactccaacataatttatgtgaataacctcaaaggtaaaacccttcaggtgtttgttgacacttagtgctggaatactgttaggactgtaccaccccccactttgttactgtaatcatttaaatcaagagtagatgttcataatcatgttaggttgtatcctcatagtcagctctagagtagtattaaatcaataaattgtttgtgccatggaagacaatcaatttacatttgaagcacattgtaacatgacctgctttcacagtatttgcagcttatgtttagtcatcacaaagtatatgagtatagtgtagttattaactaactactagataaattcacagaaactaggtattaatagtaataagcaaggaaacaactataaaacagagttaaagtctcttgaataaaacaaattgagtgtcaccaaaactatatttttaagtatttatactgtattgtcacttcagtgtacataacttaattgattattgttactattgttaatattatgtgcttagaaactgtaaaaccacacccagttaggaatgagtaacttttataattataattatatttgtgcagataatataagctacataatccaacctagcctctctcatcaatgcaaataaacaattaaagtaataaatattttagacagagtgaaagatgagtgaagaaacccaattggatgtgccagcggcaaaaaagctaagactgaatgatggtgaagcatcaagtagccaggccagtactacctatatgttcaaagagaatcaagagaatggggaggaaaagtttggtagtgaggatagctacggtaactttgtgactcctgaagaactggagaggctgagagagttcaaggtgttggacgaggtcaagtctaatgatgaggacagcaacgatgaagaatctgatagctctgacggtctgccagaagaagagatcgagaagatgctggaggaagaccttccggaggacttcaagggtgctcccaagcagaaggagaaagcgtacattactagacaaactacagttctagaagagaagggtgtgaaccacttcgaggtgctacccctggactggatcatggtgcgtcacatcagcgggatgcccatctacatgcaccgcgccaccagggtgtgcacgctctccaaaccttactttcttggatcgggcaatactcggcgtcatgatataccgattagcgccataccatgctttgcttaccgccgagctcttgaagaggaagagaagcagaaggaaattgacaaaaggattgcagaacagatccgtacgggcaattgggtcattaactcacagtctaccaagatagactactgcgagaacagccaggacagtagcactggtacagcaacgactggcgatgctttagagctacaatgtgacattgtaatgaaagaagacaccaaacttgaagacttcacagctgatataacagctgatgctgttaatggacaagagaatgcgagtgggaataatgaactggaaaatcaacctggaacatctaagagcgaaacacaagtcagtttaataactaataaggagaatggtgagtgtgctagagacctacagcggagacagccggtggtactgccgggaggtatagtgatgccgccgccgcgggtcgagactgtcagcaccagctggaagacgcagcatctctccgctgaacagattaacgaatactgcagacgcctgttcaagtttaagactgttaatatcatgcatttcaaacgttgggctgatcgccgtaagtacacgaaggctcggaagacgctccagtatcccacgctacctgaaggcaccaagctaatcactatccctgcgcagccagccaacacgggagaagagaatgcgggtggtggcaagacgaccaagcgcgactgggtgatgaacatgaacgggcgcagctacctgtctgtgttccacgagtatgtgcgccgagctctgcagaaacaacccgtctatgagttcaaacaacttgaaaatgcgtcaacaccataccaggcgacagtatttatcggcggcatgcaatacggagtggggcacgggtccagtaagcggcaggccaagtctgcggctgcgcggaactccatacatattcttatacccgagatgaaggatgagttggacgagcacgcacctaacaatgcgcccaacgatgctaatgagcctgacttcaccttcttcgactacgtgggtatcgaggacccgcgcatcacggagttctgcgcggcgacgtgcgagccctcgccgcacgccatactgcgcacctgtctactcaggaacttcggagctggggaccgacacatacatactgagatgaaaaaactggagtaccaaaagatcgagctgacgatgaaggtgggcaaacacacggctacggtcatcagcaagaacaagaagatggccaagcagcgagcttcccagtctatactacaggcactacacccacacgtacgctcatggggctcgctactccgtctgtacggctcccgttccgtcaaaagctgcaaagagaagaaactagaagaacagcagatcactctgctacaagacaaggcgcgccacaacgagcccaactacgccgtcctcgacaaactgaggaacgagatgcgtaagctacgggagagagatgaagctgttgtacctatcgggaccttactagtccatgaggacctccctacgcattcagggtcaaatctaaataatgtcgatctgtgatagatatttctacaaatgctatgatttgtctgtggttgaaacaggtttttaataccagtttaaactggtttttgataacacaaatgtctccaattcacttcacgggatttaattcaattttaggagataattcaaatattattattttatgaaagttgagtacatactttctgtacctgttttcattagttctgactttgaaaccaatcttagttatagtaactttaaatgcaatttattcgcacgattatataaaggtgtttgataataaaatatgatgtaatattctcttgtagaggttattataaaaaacatgggaagctgccaataatttacatgagcttcaattattattttggtggtttcgacgttagtagtcaagtaaggtgtaactatttattcgagctagaatatattccagtcaatattttaaagttacgtacttaacgtggtaggtaaacagtggtaatgtaacaaatgatataattaacaaaatcagctattataaatatgtagtatagaatattaaagtgttgatattgtgtctgttcatccgtagtgtgctgtgctatgctagtctggggtacaaatcaacacacgttcaatcttatgtctagttcaatattatttacgtttggttagttgtgccttaattttgctttgagatgtttctcattcattagtgatataagtttccttgttttatgtaactaacagcgctatatccaacggggccactctcttactggtctctatttccttttctatcctatcctaatgtctgtcttcctattctagtgatcttctgcaggtaacctaaatatccagtactggtctatgtgtgaaagaaacttgtggcaagcactaatcaaatctttagtcatgttttaattgcaataattagatgttatttgtcaggcaaattatatttttatagaccttgtatggcatttattaggcttagcatttagctcagtaaagtgacattattttgtatgttttctgggattataatataatcagctatctacagaaattggtaaattaaattgtgatgtaacaggaattagaagttatcaatatatctgttgatatctttaggataagaataacggttattttagactgtagactccaaactgacgtagtcactaatttcatctttgtagtaattagaactttatgtggaatgcgctataatcgaattcgcaactaaatactttcgtttatatatgtatattgtacgtacgagtacctatccttcaagcatatattttgcactttacatagttttaatgaaatatgataatagaatgttcctttctgtataatttgcaaataataaattctcaatcatatactattatactaacataatgcaggttttattcaaatgacattttgtatctatgtgtctagcaatagttttaaactttctagtaatctcgatgtcggtctaattaaaatgtaattgcaaaataagtacagttctctttttcaggaacgaatattattattacaaccagtgagcttaggatacacggtgttttatatacaaaatggttaatatgtattacatactaaaataattaattattttactaagttaatttaacaaaatcagctaaaaagttttatccttctcataagtggggcgtttattataaaagataaatattatacatttaattgtagcatatatttgtgccacatttgtacgaaacttgtttttaagctattctcttcctttagctatagttagcctaggtatataaaactataatttgaaaataggtcatgtattttgtctagttttgaactcaaaatcaatgtaatgtaagacctaagctactaatataatttatttactaagtgtcaataaatagtccaatgtacttacgaatctttgtgataggtagacatatgtatgactataggtactaaatgtgacaaaatgtattataatttttgcttatagatgttgaatctgaaagtttgcgtgcatgagcaacttttaaagtaaacatgtaattgtgattaatgaaaatagctacatttttgatgcggatgatatcttgtacttcttgatcaaataatgaaatgtaggaaaaaaatggtcgtgcgcttactacccaccgtttcattgactgctttatatattaaaatggaaaattcatgaatgaaattgtaaaatgaacactgcttttactatattagtaagtgtaatgtataatccatgctattatatcctgctttccaataaataaataacgatattattct

SEQ ID NO: 138 - DNA, 5953 bp, Spodoptera frugiperda
aaagcagagaacaaactcataaaaaagtagaattaatgggaaaggctgtgggtttaccgaatatttgaataaaatcgtaaattatttacacatattttggtctaccatttatttatcgttgtgttaattaggttgttaagattgcgaaatcatttatataatctgaaatttaataaacattgttttgagtacgggtcacgtaagtaaaaatattttctagcacacttgcaaaacggtcagattacagtttacagtgcataatgtcaatgaatcataataatttgtttgtttgtagttaattagcttacagtgcttagccttacgaacgtaatatagcgttattcagtttgacctttttgcaagtcacaagtctcaagttgtctttgcagagaacactggaatacattagcagcgctgcccgaggtggtatcctgcgggtgtattaaagcggttttgctacagactagactctgtataaacgatcagaggctctagtctggcgcaactctgccacatctccgcggccgtagcgcacgcctttcacgcggtcacagaattaccgaaagtttacatcgagcgatggttggaatccaactgttgatacacattggattttaagttccatcgctagttgtggactatcttactccaacataatttatgtgaataacctcaaaggtaaaacccttcaggtgtttgttgacacttagtgctggaatactgttaggactgtaccaccccccactttgttactgtaatcatttaaatcaagagtagatgttcataatcatgttaggttgtatcctcatagtcagctctagagtagtattaaatcaataaattgtttgtgccatggaagacaatcaatttacatttgaagcacattgtaacatgacctgctttcacagtatttgcagcttatgtttagtcatcacaaagtatatgagtatagtgtagttattaactaactactagataaattcacagaaactaggtattaatagtaataagcaaggaaacaactataaaacagagttaaagtctcttgaataaaacaaattgagtgtcaccaaaactatatttttaagtatttatactgtattgtcacttcagtgtacataacttaattgattattgttactattgttaatattatgtgcttagaaactgtaaaaccacacccagttaggaatgagtaacttttataattataattatatttgtgcagataatataagctacataatccaacctagcctctctcatcaatgcaaataaacaattaaagtaataaatattttagacagagtgaaagatgagtgaagaaacccaattggatgtgccagcggcaaaaaagctaagactgaatgatggtgaagcatcaagtagccaggccagtactacctatatgttcaaagagaatcaagagaatggggaggaaaagtttggtagtgaggatagctacggtaactttgtgactcctgaagaactggagaggctgagagagttcaaggtgttggacgaggtcaagtctaatgatgaggacagcaacgatgaagaatctgatagctctgacggtctgccagaagaagagatcgagaagatgctggaggaagaccttccggaggacttcaagggtgctcccaagcagaaggagaaagcgtacattactagacaaactacagttctagaagagaagggtgtgaaccacttcgaggtgctacccctggactggatcatggtgcgtcacatcagcgggatgcccatctacatgcaccgcgccaccagggtgtgcacgctctccaaaccttactttcttggatcgggcaatactcggcgtcatgatataccgattagcgccataccatgctttgcttaccgccgagctcttgaagaggaagagaagcagaaggaaattgacaaaaggattgcagaacagatccgtacgggcaattgggtcattaactcacagtctaccaagatagactactgcgagaacagccaggacagtagcactggtacagcaacgactggcgatgctttagagctacaatgtgacattgtaatgaaagaagacaccaaacttgaagacttcacagctgatataacagctgatgctgttaatggacaagagaatgcgagtgggaataatgaactggaaaatcaacctggaacatctaagagcgaaacacaagtcagtttaataactaataaggagaatggtgagtgtgctagagacctacagcggagacagccggtggtactgccgggaggtatagtgatgccgccgccgcgggtcgagactgtcagcaccagctggaagacgcagcatctctccgctgaacagattaacgaatactgcagacgcctgttcaagtttaagactgttaatatcatgcatttcaaacgttgggctgatcgccgtaagtacacgaaggctcggaagacgctccagtatcccacgctacctgaaggcaccaagctaatcactatccctgcgcagccagccaacacgggagaagagaatgcgggtggtggcaagacgaccaagcgcgactgggtgatgaacatgaacgggcgcagctacctgtctgtgttccacgagtatgtgcgccgagctctgcagaaacaacccgtctatgagttcaaacaacttgaaaatgcgtcaacaccataccaggcgacagtatttatcggcggcatgcaatacggagtggggcacgggtccagtaagcggcaggccaagtctgcggctgcgcggaactccatacatattcttatacccgagatgaaggatgagttggacgagcacgcacctaacaatgcgcccaacgatgctaatgagcctgacttcaccgtaagtatcgctactgagtgctgcctcgtaaactctatacattttttttttttataagtattctactgtaatgtaatcttcatttcataaatttctctatgatacccatttatagagtacaacttggctaagttggtcagcccatcagctacaatcaccacaaactaattcacgaattaaacaacatactattctgcttctaactccaatattttcctgtatacttaatatctaagactacaatttaggagatattttatattgtgttgtcagttcttcgactacgtgggtatcgaggacccgcgcatcacggagttctgcgcggcgacgtgcgagccctcgccgcacgccatactgcgcacctgtctactcaggaacttcggagctggggaccgacacatacatactgagatgaaaaaactggagtaccaaaagatcgagctgacgatgaaggtgggcaaacacacggctacggtcatcagcaagaacaagaagatggccaagcagcgagcttcccagtctatactacaggcactacacccacacgtacgctcatggggctcgctactccgtctgtacggctcccgttccgtcaaaagctgcaaagagaagaaactagaagaacagcagatcactctgctacaagacaaggcgcgccacaacgagcccaactacgccgtcctcgacaaactgaggaacgagatgcgtaagctacgggagagagatgaagctgttgtacctatcgggaccttactagtccatgaggacctccctacgcattcagggtcaaatctaaataatgtcgatctgtgatagatatttctacaaatgctatgatttgtctgtggttgaaacaggtttttaataccagtttaaactggtttttgataacacaaatgtctccaattcacttcacgggatttaattcaattttaggagataattcaaatattattattttatgaaagttgagtacatactttctgtacctgttttcattagttctgactttgaaaccaatcttagttatagtaactttaaatgcaatttattcgcacgattatataaaggtgtttgataataaaatatgatgtaatattctcttgtagaggttattataaaaaacatgggaagctgccaataatttacatgagcttcaattattattttggtggtttcgacgttagtagtcaagtaaggtgtaactatttattcgagctagaatatattccagtcaatattttaaagttacgtacttaacgtggtaggtaaacagtggtaatgtaacaaatgatataattaacaaaatcagctattataaatatgtagtatagaatattaaagtgttgatattgtgtctgttcatccgtagtgtgctgtgctatgctagtctggggtacaaatcaacacacgttcaatcttatgtctagttcaatattatttacgtttggttagttgtgccttaattttgctttgagatgtttctcattcattagtgatataagtttccttgttttatgtaactaacagcgctatatccaacggggccactctcttactggtctctatttccttttctatcctatcctaatgtctgtcttcctattctagtgatcttctgcaggtaacctaaatatccagtactggtctatgtgtgaaagaaacttgtggcaagcactaatcaaatctttagtcatgttttaattgcaataattagatgttatttgtcaggcaaattatatttttatagaccttgtatggcatttattaggcttagcatttagctcagtaaagtgacattattttgtatgttttctgggattataatataatcagctatctacagaaattggtaaattaaattgtgatgtaacaggaattagaagttatcaatatatctgttgatatctttaggataagaataacggttattttagactgtagactccaaactgacgtagtcactaatttcatctttgtagtaattagaactttatgtggaatgcgctataatcgaattcgcaactaaatactttcgtttatatatgtatattgtacgtacgagtacctatccttcaagcatatattttgcactttacatagttttaatgaaatatgataatagaatgttcctttctgtataatttgcaaataataaattctcaatcatatactattatactaacataatgcaggttttattcaaatgacattttgtatctatgtgtctagcaatagttttaaactttctagtaatctcgatgtcggtctaattaaaatgtaattgcaaaataagtacagttctctttttcaggaacgaatattattattacaaccagtgagcttaggatacacggtgttttatatacaaaatggttaatatgtattacatactaaaataattaattattttactaagttaatttaacaaaatcagctaaaaagttttatccttctcataagtggggcgtttattataaaagataaatattatacatttaattgtagcatatatttgtgccacatttgtacgaaacttgtttttaagctattctcttcctttagctatagttagcctaggtatataaaactataatttgaaaataggtcatgtattttgtctagttttgaactcaaaatcaatgtaatgtaagacctaagctactaatataatttatttactaagtgtcaataaatagtccaatgtacttacgaatctttgtgataggtagacatatgtatgactataggtactaaatgtgacaaaatgtattataatttttgcttatagatgttgaatctgaaagtttgcgtgcatgagcaacttttaaagtaaacatgtaattgtgattaatgaaaatagctacatttttgatgcggatgatatcttgtacttcttgatcaaataatgaaatgtaggaaaaaaatggtcgtgcgcttactacccaccgtttcattgactgctttatatattaaaatggaaaattcatgaatgaaattgtaaaatgaacactgcttttactatattagtaagtgtaatgtataatccatgctattatatcctgctttccaataaataaataacgatattattct

SEQ ID NO: 139 - DNA, 6377 bp, Spodoptera frugiperda
ccaatagaaaaaaagcagagaacaaactcataaaaaagtagaattaatgggaaaggctgtgggtttaccgaatatttgaataaaatcgtaaattatttacacatattttggtctaccatttatttatcgttgtgttaattaggttgttaagattgcgaaatcatttatataatctgaaatttaataaacattgttttgagtacgggtcacgtaagtaaaaatattttctagcacacttgcaaaacggtcagattacagtttacagtgcataatgtcaatgaatcataataatttgtttgtttgtagttaattagcttacagtgcttagccttacgaacgtaatatagcgttattcagtttgacctttttgcaagtcacaagtctcaagttgtctttgcagagaacactggaatacattagcagcgctgcccgaggtggtatcctgcgggtgtattaaagcggttttgctacagactagactctgtataaacgatcagaggctctagtctggcgcaactctgccacatctccgcggccgtagcgcacgcctttcacgcggtcacagaattaccgaaagtttacatcgagcgatggttggaatccaactgttgatacacattggattttaagttccatcgctagttgtggactatcttactccaacataatttatgtgaataacctcaaaggtaaaacccttcaggtgtttgttgacacttagtgctggaatactgttaggactgtaccaccccccactttgttactgtaatcatttaaatcaagagtagatgttcataatcatgttaggttgtatcctcatagtcagctctagagtagtattaaatcaataaattgtttgtgccatggaagacaatcaatttacatttgaagcacattgtaacatgacctgctttcacagtatttgcagcttatgtttagtcatcacaaagtatatgagtatagtgtagttattaactaactactagataaattcacagaaactaggtattaatagtaataagcaaggaaacaactataaaacagagttaaagtctcttgaataaaacaaattgagtgtcaccaaaactatatttttaagtatttatactgtattgtcacttcagtgtacataacttaattgattattgttactattgttaatattatgtgcttagaaactgtaaaaccacacccagttaggaatgagtaacttttataattataattatatttgtgcagataatataagctacataatccaacctagcctctctcatcaatgcaaataaacaattaaagtaataaatattttagacagagtgaaagatgagtgaagaaacccaattggatgtgccagcggcaaaaaagctaagactgaatgatggtgaagcatcaagtagccaggccagtactacctatatgttcaaagagaatcaagagaatggggaggaaaagtttggtagtgaggatagctacggtaactttgtgactcctgaagaactggagaggctgagagagttcaaggtgttggacgaggtcaagtctaatgatgaggacagcaacgatgaagaatctgatagctctgacggtagtcctgtctttgtgtgtattgtcttgcatgctctgtctctccgatagtgtgtttctacacttgcagtcaaagaactactgttattatgtgccagtcataaaagatttagattccttcatatatttatatgtatgtttattttagtatttattctttaactgcaatgtaagtaatgaataattgtttctcttcgatattacatgcaatcctgtacttatttatcaaggagtattgtttcctatttaatttttaatttccttcattctaggtgtgtactgtgtaccctaaacttatggtttcagcttccctgacaattattatttctctcttcaaatattacttgttttacattgtgcttcatgattttaattttttatttcttagaatgtttttacaatcaaattacctgtcttattgtctatacaaactaatacatacttagctaaataaagttcagggttcttttaataattaaagaatgatcttcttacttttataaaatacttcaacaaaactatgggaaatctttgtgtctactatgatgaagtaatgtctacaaggtagttaaagtggtagatgtattcaaaggtctgccagaagaagagatcgagaagatgctggaggaagaccttccggaggacttcaagggtgctcccaagcagaaggagaaagcgtacattactagacaaactacagttctagaagagaagggtgtgaaccacttcgaggtgctacccctggactggatcatggtgcgtcacatcagcgggatgcccatctacatgcaccgcgccaccagggtgtgcacgctctccaaaccttactttcttggatcgggcaatactcgggtgagtgctacatgtgactgtgttaagaataatcggattcctgtgcaataatctttattagttgcatgataagtaacccggttcttttatttcagcgtcatgatataccgattagcgccataccatgctttgcttaccgccgagctcttgaagaggaagagaagcagaaggaaattgacaaaaggattgcagaacagatccgtacgggcaattgggtcattaactcacagtctaccaagatagactactgcgagaacagccaggacagtagcactggtacagcaacgactggcgatgctttagagctacaatgtgacattgtaatgaaagaagacaccaaacttgaagacttcacagctgatataacagctgatgctgttaatggacaagagaatgcgagtgggaataatgaactggaaaatcaacctggaacatctaagagcgaaacacaagtcagtttaataactaataaggagaatggtgagtgtgctagagacctacagcggagacagccggtggtactgccgggaggtatagtgatgccgccgccgcgggtcgagactgtcagcaccagctggaagacgcagcatctctccgctgaacagattaacgaatactgcagacgcctgttcaagtttaagactgttaatatcatgcatttcaaacgttgggctgatcgccgtaagtacacgaaggctcggaagacgctccagtatcccacgctacctgaaggcaccaagctaatcactatccctgcgcagccagccaacacgggagaagagaatgcgggtggtggcaagacgaccaagcgcgactgggtgatgaacatgaacgggcgcagctacctgtctgtgttccacgagtatgtgcgccgagctctgcagaaacaacccgtctatgagttcaaacaacttgaaaatgcgtcaacaccataccaggcgacagtatttatcggcggcatgcaatacggagtggggcacgggtccagtaagcggcaggccaagtctgcggctgcgcggaactccatacatattcttatacccgagatgaaggatgagttggacgagcacgcacctaacaatgcgcccaacgatgctaatgagcctgacttcaccttcttcgactacgtgggtatcgaggacccgcgcatcacggagttctgcgcggcgacgtgcgagccctcgccgcacgccatactgcgcacctgtctactcaggaacttcggagctggggaccgacacatacatactgagatgaaaaaactggagtaccaaaagatcgagctgacgatgaaggtgggcaaacacacggctacggtcatcagcaagaacaagaagatggccaagcagcgagcttcccagtctatactacaggcactacacccacacgtacgctcatggggctcgctactccgtctgtacggctcccgttccgtcaaaagctgcaaagagaagaaactagaagaacagcagatcactctgctacaagacaaggcgcgccacaacgagcccaactacgccgtcctcgacaaactgaggaacgagatgcgtaagctacgggagagagatgaagctgttgtacctatcgggaccttactagtccatgaggacctccctacgcattcagggtcaaatctaaataatgtcgatctgtgatagatatttctacaaatgctatgatttgtctgtggttgaaacaggtttttaataccagtttaaactggtttttgataacacaaatgtctccaattcacttcacgggatttaattcaattttaggagataattcaaatattattattttatgaaagttgagtacatactttctgtacctgttttcattagttctgactttgaaaccaatcttagttatagtaactttaaatgcaatttattcgcacgattatataaaggtgtttgataataaaatatgatgtaatattctcttgtagaggttattataaaaaacatgggaagctgccaataatttacatgagcttcaattattattttggtggtttcgacgttagtagtcaagtaaggtgtaactatttattcgagctagaatatattccagtcaatattttaaagttacgtacttaacgtggtaggtaaacagtggtaatgtaacaaatgatataattaacaaaatcagctattataaatatgtagtatagaatattaaagtgttgatattgtgtctgttcatccgtagtgtgctgtgctatgctagtctggggtacaaatcaacacacgttcaatcttatgtctagttcaatattatttacgtttggttagttgtgccttaattttgctttgagatgtttctcattcattagtgatataagtttccttgttttatgtaactaacagcgctatatccaacggggccactctcttactggtctctatttccttttctatcctatcctaatgtctgtcttcctattctagtgatcttctgcaggtaacctaaatatccagtactggtctatgtgtgaaagaaacttgtggcaagcactaatcaaatctttagtcatgttttaattgcaataattagatgttatttgtcaggcaaattatatttttatagaccttgtatggcatttattaggcttagcatttagctcagtaaagtgacattattttgtatgttttctgggattataatataatcagctatctacagaaattggtaaattaaattgtgatgtaacaggaattagaagttatcaatatatctgttgatatctttaggataagaataacggttattttagactgtagactccaaactgacgtagtcactaatttcatctttgtagtaattagaactttatgtggaatgcgctataatcgaattcgcaactaaatactttcgtttatatatgtatattgtacgtacgagtacctatccttcaagcatatattttgcactttacatagttttaatgaaatatgataatagaatgttcctttctgtataatttgcaaataataaattctcaatcatatactattatactaacataatgcaggttttattcaaatgacattttgtatctatgtgtctagcaatagttttaaactttctagtaatctcgatgtcggtctaattaaaatgtaattgcaaaataagtacagttctctttttcaggaacgaatattattattacaaccagtgagcttaggatacacggtgttttatatacaaaatggttaatatgtattacatactaaaataattaattattttactaagttaatttaacaaaatcagctaaaaagttttatccttctcataagtggggcgtttattataaaagataaatattatacatttaattgtagcatatatttgtgccacatttgtacgaaacttgtttttaagctattctcttcctttagctatagttagcctaggtatataaaactataatttgaaaataggtcatgtattttgtctagttttgaactcaaaatcaatgtaatgtaagacctaagctactaatataatttatttactaagtgtcaataaatagtccaatgtacttacgaatctttgtgataggtagacatatgtatgactataggtactaaatgtgacaaaatgtattataatttttgcttatagatgttgaatctgaaagtttgcgtgcatgagcaacttttaaagtaaacatgtaattgtgattaatgaaaatagctacatttttgatgcggatgatatcttgtacttcttgatcaaataatgaaatgtaggaaaaaaatggtcgtgcgcttactacccaccgtttcattgactgctttatatattaaaatggaaaattcatgaatgaaattgtaaaatgaacactgcttttactatattagtaagtgtaatgtataatccatgctattatatcctgctttccaataaataaataacgatattattct

SEQ ID NO: 140 - DNA, 2055 bp, Spodoptera frugiperda
ttgttcgaaattggttggaatattcttttgatcgttaccgtgtggagactaaacatcaaatttctataaatcaataccactatgaatggaagtgtagaagcaagccaagactcctcaagttgcccattctttgggaaaaacttacaaaatggtaatgccgagcttaataagtttcatattttggatgaaactgaaggaaacgatgacactgataactcagcagacttcgactctgatattcctgatgatgaaattgaaaaaatgttggaagaggccttggaaaaacggaagagaaaagcagcagatgccgggttagacgacgaagaaattccattcgaagaaaaaaacaagatcctcttaattgaaaaaggacaaaaccacttcgacgttcttccagaagggtggattcaagtaacacacaatagtggaatgcctatttatttacaaaaagtttctagggtttgttcattatctaggccttattttctaggtccaggttcagcaagaaaacaccatatacctgttaatgccataccatgtttaaattacagaaaagccttagaaaaggaagaatcggagtccaatgaaccagaaaccaacaatcattgcgatcagagctttccaaatgctaagatcgaaactgttcaggagaatcttcaaatgcagaatctccctcctgaacaggttcgggagtattgtgagaagctatttaaattccagaccatgaaagtattgagatttaaatcttggtctgaaagaagaaaatttacgaaacgattaaaacaaaaaaagcaattacaacgactgacacttccagatggtaccaaattaataacctttccaattagaaaatcagatagttcggaaaataacacgaattctaaaaaggaatgggtcatgaaccccaacggaaaatcgtatgtgtgcattcttcatgaatatgttcaacatgttttgaagaagcaacccacgtatcagtttacggaactagaaaatgcagcaactccttatgctgccacagttattatcaaagatatgcggtacggagttggatacgggaccagtaaaaagcaagccaaatctgacgcagccaaggctaccctagaaatccttattccggaaatgaaatcaaagattgttcctgataatcaaacaggggattctacgaaaaaagacaaagatcaagatctgtctttctttgacgaaatacgagtagaagatcccagagtttttgaattttgtgccaaaactaccgagccagctccgtacgacatacttttgacttgtcttcagagaaatttcggcttagacgaccttcaaattagttatcaaggaaatacttcaaagtcccatgaattcaccatgactgtaggtaaacatactgcgactgtatcttgtaaaaataaaagggacggcaaacagagggcatctcaagcaattcttcaagcactacatcctagcattacttcatggggttcccttttgcgactatacggaaaccattcgatcaagagcttcaaggagaagaaattagaagagcaagagattacttctctgcaaagtaaagcggctgtaaatcaaccaaactatgccattttatcgaaattgaatatagaactaggtaaattaagggaaaagcgtaaggccatacagccgatcggtgtattagataccgatggaactgaagtagtagcgccattctcttcaacttctaatttgcataatttagctgtgtaatcctagatattgtagtagtccaatgtagagttggtaaatattcgaaaaaaatcagtcacaagacaaatacctaatttcatatacgtattatacattccaaacatacaagcaacatttcctgtatataactactagtcaagaaaagaaaatcatctattcctaagatctaagagatcactaaggtactattgccttctagaatgctaaaaaatcagtttcaacattttttgtatgttatttatatggcaatttttttatattatacaaattttgaaagttacaaaaaaactttttcattcttcctgtattttttcgtcc

SEQ ID NO: 141 - DNA, 2055 bp, Spodoptera frugiperda; identical to SEQ ID NO: 140

SEQ ID NO: 142 - DNA, 1943 bp, Spodoptera frugiperda
tgacggtctgccagaagaagagattgagaagatgttggaggaagaccttccagaggacttcaagggtgctcccaagcagaaggagaaagcatacattactagacaaactacagttttagaagagaagggtgtgaaccacttcgaggtgctacccttggactggatcatggtgcgtcacatcagcgggatgcccatctacatgcaccgcgccaccagggtgtgcacgctctccaaaccttactttcttggatcgggcaatactcggcgtcatgatataccgattagcgccataccatgcttcgcttaccgccgagctcttgaagaggaagaaaagcagaaggaaattgacaaaaggattgcagaacagatccgtacgggcaattgggttatcaactcacagtctaccaagatagactactgcgagaacagccaggacagtagcactggtacagcaaccactggcgatgctatagagctacaatgtgacattgtaatgaaagaagacaccaaacttgaagacttcacagctgatataacagctgacgctgttaatggagaaggaaatgcgactgagctggaaaatcaacctggaacatctaagaacgaaacacaactagtcagtttaataactaataaggagaatggtgagtgtcctagagacctacagcggagacagccggtggtactgccgggaggtatagtgatgccgccgccgcgggtcgagactgtcagcaccagctggaagactcaacatctctccgctgaacagatcaacgaatactgccgacgcctgttcaagtttaagactgttaatatcatgcatttcaaacgttgggctgatcgccgtaagtacacgaaggcacgaaagacgctccagtaccccacgctacctgaaggcaccaagctgatcactatccctgcgcagccggccaacacgggagaagagaatgcgggtggtggtaagacgaccaagcgcgactgggtgatgaacatgaacgggcgcagctacctatctgtgttccacgagtatgtgcgccgagcgctgcagaaacagcccgtctatgagttcaagcagcttgaaaatgcgtcaacaccataccaagcgacagtatttatcggcggcatgcaatacggagtgggccacgggtccagtaagcgccaggccaagtctgcggccgcgcggaactccatccacattctcatacccgagatgaaggatgagttggacgagcacgcacctaacaatgctcccaatgatgctaatgagcctgacttcaccttcttcgactacgtgggtatcgaggacccgcgcatcacggagttctgcgcggcgacgtgcgagccctcgccgcacgccatactgcgcacctgtctgctcaggaacttcggagctggggaccgacacatacatactgagatgaagaaactggagtaccaaaagatcgagttgacgatgaaggtgggcaaacacacggctaccgtcatcagcaagaacaagaagatggccaagcagcgagcttcccagtctatactacaggcactacacccacacgtacgctcatggggctcgctactccgtctgtacggctcccgctctgtcaaaagctgcaaagagaagaaactagaagaacagcagatcactcttctacaagacaaggcgcgccacaacgagcccaactacgccgtcctcgacaaactgaggaacgagatgcgtaagctacgggagagagatgaagccgttgtacctattgggaccttactagttcatgaggacctccccacccactcagggtctaatctgaataatgtcgatctgtgatagaaatattttacaaatgctatgatttgtctgtggttgaaacaggtttttgataccagtttaaactggtttttgataacacaaatgtgtccaattcacttcacgggatttaattcaattttag

SEQ ID NO: 143 - DNA, 3294 bp, Spodoptera frugiperda
caggccagtacttcctatatgttcaaagagaatcaagagaacagggaggaaaagtttggtagtgaggatagctacggtaactttgtgactcctgaagaactggagaggctgagagagttcaaggtgttggacgaggtcaagtctaacgatgaggacagcaacgatgaagaatctgatagctctgacggtctgccagaagaagagatcgagaagatgctggaggaagaccttccggaggacttcaagggtgctcccaagcagaaggagaaagcgtacattactagacaaactacagttctagaagagaagggtgtgaaccacttcgaggtgctccccctggactggatcatggtgcggcacatcagcgggatgcccatctacatgcaccgcgccaccagggtgtgcacgctctccaaaccttactttcttggatcgggcaatactcggcgtcatgatataccgattagcgccataccatgctttgcttaccgccgagctcttgaagaggaagaaaagcagaaggaaattgacaaaaggattgcagaacagatccgtacgggcaattgggtcattaactcacagtctaccaagatagactactgcgagaacagccaggacagtagcactggtacagcaaccactggcgatgctatagagctacaatgtgacattgtaatgaaagaagacaccaaacttgaagacttcacagctgatataacatctgatgctgttaatggacaagagaatgcgagtgggaataatgaactggaaaatcaacctggaacatctaagaacgaaacacaagtcagtataataactaataaggagaatggtgagtgtcctagagacctacagcggagacagccggtggtactgccgggaggtatagtgatgccgccgccgcgggtcgagactgtcagcaccagctggaagacgcagcatctctccgctgaacagatcaacgaatactgcagacgcctgttcaagtttaagactgttaatatcatgcatttcaaacgttgggctgatcgccgtaagtacacgaaggcacgaaagacgctccagtaccccacgctacctgaaggcaccaagctgatcactatccctgcgcagccagccaacacgggcgaagagaatgcgggtggtggcaagacgaccaagcgcgactgggtgatgaacatgaacgggcgcagctacctatctgtgttccacgaatacgtgcgccgagcgctgcagaaacaacccgtctatgagttcaaacaacttgaaaatgcgtcaacaccataccaggcgacagtatttatcggcggcatgcaatacggagtgggccacgggtccagtaagcggcaggccaagtctgcggccgcgaggaactccatacatattctcatacccgagatgaaggatgagttggacgagcacgcccctaacaatgcgcccaatgatgctaatgagcctgacttcacctttttcgactacgtgggtatcgaggacccgcgcatcacggagttctgcgcggcgacgtgcgagccctcgccgcacgccatactgcgcacctgtctgctcaggaacttcggagctggggaccgacacatacatactgagatgaagaaactggagtaccaaaagatcgagttgacgatgaaggtgggcaaacacacggctaccgtcatcagcaagaacaagaagatggccaagcagcgagcttcccagtctatactacaggcacttcacccacacgtacgctcttggggctcgctactccgtctgtacggttcccgttccgtcaaaagctgcaaagagaagaaactagaagaacagcagatcactcttctacaagacaaggcgcgccacaacgagcccaactacgccgtccttgacaaactgaggaacgagatgcgtaagctacgggagagagatgaagccgttgtacctattgggaccttactagttcatgaggacctccccacccactcagggtctaatctgaataatgtcgatctgtgatagaaatattttacaaatgctatgatttgtctgtggttgaaacaggtttttaataccagtttaaactggtttttgataacacaaatgtctccaattaacttcacgggatttaattcaattttaggagataattcaaatattattattttatgaaagttgagtacatactttctgtacctgttttcattagttgtgactttgaaaccaatattagttatagtacctttaaatgcaatttattcgcacgattatataaaggtgtttgataataaaatatgatgtaatattctcttgtggaggttattataaaaacacttttgaagctgccaatcttttacatgagcttcaattattattttggtggtttcgtcgttagtagtcaagtaaggtgtaactatttattcgaactagaatatattccagtcaatattttaaagttacgtacttaacgtggtaggtaaacagtggtaatgtaacaaatgatataattaacaaaatcagctattataaatatgtagtatataatattaaagtgttgatattgtgtctgttcatccgtagtgtgctgtactatgctagtctgaggtacaaatcaacacacgttcaatcttatgtctagttcaatatttacgtttggttagttgtgccttaattttggtcgagataatgtgtctcattcattagtgttaagtttcctattgttttatgtaactaacagtgctatatccaatagggccactctctcactggtctgtatctattctagaattcctttcctatcctatcctaatgtctgtcttccttttctagtgatcttcaggtaacctaaatatccagtacttgtctatgtgtgaaagaaagtcgtggcaagcactaatcaaatctttagtcatctttgcaataattagatgttatttgtcaggcaaattatatttttatagaccttgtatggcatttatagtaggcttagcatttagctcagtaaaggtacataattttgtatgttttctgggattatagtataatcagctatctacagaaattggtaaattaaattgtgatgtaacaggaatgagaagttatcaatacatttcctgatatcttagtttaggataagaataacaattattttagactgtagactccaaactgacgtagtcactaatttcctttgtggtaataataactttatgtggaatatctaatcgaattcgtaactaaatattttcgtttatacatgtatattgtaagtacgagtacctatccttaaagcatattatattttgc

SEQ ID NO: 144 - DNA, 3719 bp, Spodoptera frugiperda
agtctgtggccgatattcgattcattttcagtggacacgagactcaagaaaaaggatatgaagtgaaaaatattctatggggtttattttcttgaatattgttggtgtagtagtattgagctgcaatgaacgtagtgggtgtaggtagcgagcctactggggaggtggctctcctagtagaagaactcagtcgagcagttgagcttactttaatccccactgtttcccatgaagaaagaagccaggcctataatgcgtgtgaaagcttcaaagagaactcgccatggtgtgcccaggctggtctcttgctggccagtggcaatcagcattcccctggagttaaacactttggtctccagttaatggaacatactgtcaagtatagatggacacaaataactcaagcagaaaaaatatttatcaaggaaaatgctatgaaactcttatatctcggtggttgggacaccagccacttgaatgatgcacttgcccgtgtcattgtggagatgataaagcgagagtggcctcagcagtggcctactttgctggcagagttgagtgatgcatgctccagaggacataggcatactcagatagtactgcatgtgttcttgaggttggctgaggatgtagctattttacagactttagaaaaccaccagagacgaaaggatataaaccagggtctaactagcaacatgtctgaaatatttgcgttcttcatgcggctcattgagatgcacgtgcaggagttcagagagaagaccacggcaggcgattatgctgccgctgctagtcatggacaagtggttcaggttgtattactaacgctaactggatacgtggaatgggtgtccataaatcacgtagtcatgaacaatggccgcttgttacaaattctttgcattttattgcaagatgatgtgttccaactgcctgctgctgaatgtctactgcaaatcgtgaataggaaaggatctactaaggaaaagaaaccactcgttatattatttagtaaagatgccattacatgcatgcaccgcgctgcggtcgctagcatcaatactgtcgatgaggctcactatttgttcctgaaaaagttctcacaggtcctagcaggtttagctcaacagctaacatctctatggtcgtacgccacagacgcggagtcttggctgccagtgatattagaaaccatgttgttattgacgtcacatccgtcactaacactcgcacatactgccaactctgtgtggctagcgttcttgaaacatgaacaaatatctaagctgccatatgtattagccatcgtacctcgctggttgcaggcgtctgcacctaaagtacttaaggtatcatatccttcatcacgtgcgaacaatgcaaatgacgccgttacctacgcttgtatggactatgacagtgaacaggaattcgccattttcttttcacgatgtcgcactgaaatattagaaagttttaaattttgcatgacagcagcaccactagtaacttggggttacgtggaacaatggactcgtgcagcactcgacaaggtcgatacttgtccgcaacagatggacacacatcatccgatgtatatagaatgggaggctttatctcaggtgttagacatggtactatctcggctcctgcaagcggatcctcggccgagcgtagtggaaggcttgcagctactacagcgctgtgtagtatgttccccgaccgcgccactcatactgtcgctgttgctgtcctttatttcggcgctatttgtgttcctcagctgcgcttatagtcaactggctggtccaggagtgggtgtggcgggagcagatttactccctcgagtactggacaagatattcgcagcgctggtgtacgagggcaccccgcccgacaaccgacgctcgcgcagcgtcaagaatgttaggcgacatgcagctggactgctcgtcaaattgggatccaagtacccactactgctactgcctgtatttggccgactacacgagctatgtcgcgccgcgctggcccggccggacctcagtgcagtggagagtgtaacactgcaagaggctttactactcgtctcgaaccacttctgttgttacgagagacagagcgctttggtggctcaggtcctgggtgactgcagcgagcgctgggctagtctaagcccccacttagctagcgcggaaggtttgactcgcctggtcggcttggacgcgccgcctacagaagacgaggacgactgtggacgtgcacgacgcacacttttacatgcgcttacattgttattgggcgtggtgaaacgtacgtgcgtcccgagcgacccggacaaggcggcgcgcggcgggttcggcggcggcgtgacggcggccggcaaccccgtgtggcgcaacccgtgcgccgcgcacgtgctgccgctgttccccgccgcgctggcgctggcgcgcgccacgcacgcgctgcacgcgcccgccgccgccgcgctccgccaccccgcgcacgcacgggccctcgcgccgcccgcctccgagcgacggaacctactgggacagcgggaccatgaacccacgcaacatgctcgcccacaggaacgcatgcaaagtttcctccacacgctacacgagaacgtgtgccacctagtgggcgctgcggcggggacgctcggccgcgagttgtacgcagtgcccggcctcgccaacttcctcatagactcactgttctacggactcgaatacttgcccgaccactggctgcgacccatcgtacgaaacgcattaaagccgttactccatcattgcccaccagctcattacgcagatgtagccctgcctttactagaacatttcgctcctttcatgctgtcccatctctcactgcgttgggattatatctcgtctctctatgaatctggcaaattggaggaggaaggtggcagtgagtcacaggaggtactcgaagacatcctcgtcaggaatcttactagagaacatcttgaagtccttaagatatcgctagtagacggcggactaagtatcgagagtacagtggacgagatggaggacgacactacgacgggcagtggcggcgctcagcaacgtgcgcccgaccacgtctccgagctcggcgcgctcgtactagcgcagccctgtgccggacctgctgtactgtacacggtgatccgcgccctaacatggaacgactctccgtcgtcgctgcgtggcacggcgctggctctgcccgcgctgcgcggcgcgctggcggcggggcgcgtgggcgcgggcgaggccaacggcgcgctcactgccgtgctgcaggcgctgcgtctgcatggacaacacgacgccaaccaggccgcgctgctcgcactggctgtacagacatacgagatcctgcgtcctctattccccggcatagtagcagtactacgtgccatccccgacgtggacgcgcacgatctccaccgactcgacgagaaactcaactcgcacaacacaaagccctcgaaaattgataagagcaaacgtgacttattcaagaaaatcacttctagactaatcggtcgcaatgtgggccaactgttcaagaaagaagtgtatatcctggacttgccgacaatgcacattgtgaaggacaagccgcgcagtgccatcgacactccggagggcgccgggctagaacgactgtttgcgcccagcgcacccacttag

SEQ ID NO: 145 - DNA, 4136 bp, Spodoptera frugiperda
gatatttgtcaaccaaaagagttcgctagtgtagccggcaacagtcaagttggaattgttgcacatttttaataaatatttaatcatatgttgtaaataaactcgaagattccgtaagtctgttaaatctgaagtatacaaattgctaacgcatataattatccaccatcaaatacaaaccctcatgacaaataatctcgcataatttgcaaacattaaaagaccatgctgttgaccaaggtgcttttaatagatttattattttagctgccaaattgccaatatagtttggaagtatggctggaccagacgtggcagcgctagctgctgacttagcacgtgctgtagaacttactatgagtacaggagcttctcaacaagacagactaagggcttatcaagcatgcgagagttttaaggaaacttcccctctttgcgctgaagcaggcctatatctagcagctggcactcaacactcaccaatatcaagacattttggccttcagctcatggaacatactgtaaaatatcgatggactcaaatatcacaacaagaaaagattttcattaaggaaaacgcaatgaaattactttctgctggaggtgttagtgatgaatcccacatgaaagatgcccttagtcgtgtaattgtagaaatggttaaacgagaatggccccagcaatggcctggtctattgggagaactgtcagatgcatgtgcctgtggggaaactcaaactgagcttgttttacttgttttcttacgtctcgttgaagatgtagcattattacagacactggaatctaaccaacgcagaaaagatatttaccatgctctgacagctaacatggcagtgatcttcgacttctttctcagactcatagaactgcaggtcagtcagtttagactcaacagtgagtctaacgttaccaaagccaatgctcacggaagagtggtccaggtggttttgttgactcttactggctttgtagaatgggtttctatgagtcacataatggcccaaaacggaagattactacaaattctttgccttctgttgaatgatactgcatttcagtattctgcagcagaatgcctatcacagattgtaaatagaaaaggtaaagtggaagaaaggaagcctttgttaatactattcaataacgagccgatggaatgcatcctcaatgctgccaaaaatcctggaaccattggagatgaacaacattatttgtttaaaaagaaattaattcaggttatgggtggcttgacaactcaagtgtgcaccttatggggtaaagacggcctcgcccgcccatctaacttctcgatgttcctcgaggctgtcctcgcttacagcagccatcccagtctcaacatcgcccatgctgctaaccctctgtggaaccaaatgttaaaaaacgaacaagtggccagagatcccatctttttgtcctacataccgcagtgggtgcaatgcacggcaccaaagataatcaagtttaattatcctgtcggtaagagtccaactaggagggatcttggggagaacgccttgtacgctaggctggatttcgatagcgatgaggagttttccggttatttctacaggtgtcgatcagactttttggattctttcaggcaagcaactgtagtagcacctttagtaacctttaattacgtcgaacaatggttaatgaagtgcctgcaagttccaaacgtcaccgctggtttatcgttcttggatccggtatatcaagagtgggaagccttatccaattttctggagagcatcttgagtagggtcttgcaagcaaacggccgccctcccattgcttcgggcctgagattacttcagttgtgtttgtcttatcaaccagcggatgctttgatcctatcaaccctgctgacttgcatttcggcgttgtttgtatttttgagtatgtcgactggacaaatggcccctacagcaaattctgtggcagcttcaggtgccgcactcttaccccaagtactcgaaaaaatcttctcaactctagtctacactcccgaaggccagtcaatcaacaaccgatccagagccgtgaaaaatgtcaggcgtcacgcggcttctctaatggtgaaaataggcaacaaataccctttgctgctactaccggtcttcgatcaaattagagccacggtagaggctctgtctaggcccgagggacctgcgcatttaagctgtttggagaaggttacgttgcaggaggctctgttgttgatttccaatcattttggggattacgacaggcagagtacgtttgtgggggaagtgctaagggaagccaatgctcaatttttagaaatagtcaatttaggtgcatttagaaacgcagcaaacttcatcactttcgtcggattggacaaacctccggttccctccaacagtgaagacgcctgcggcataaacaggggcaacatcatcttttgcgtcaacctccttctaggtgccgtcaaacgttgtgcttggccagacgatcctgaacgagcgacccgtggtggatttgtggtgtctcttacagaatctggcaaccctgtatgccgaaacccggcagctccccacgttgtacctctactgccacatattctttctttaatcaagatatttaacgaactgttcactcctgagactcaaagtttaattcatgacagttataaaggatgtttagcaatgcaagagactgaacgaatgaacctcctcggattgatgggccacactataggaactgaagcagcggaatcacaagtggtgcaaagcccattagagaggatgcagcggttccttactgcattacacgaagcctgctatcacatgatgggctctctagggccctctttaggaagagatctgtataatataccggatcttggcctggcgatcgtcaacagtgttttgtcatttatacaatatattccagattatcgaattaggccgataattagggtgtatttgaggcagtttattttctcttgccccgcaccattttacgaagtcgtcgttctacctatcatgacacatctttctcccataattttgtcgaggttacatacaaaatggcagcaagttatcgagttccgcaatcgcgaagcccaagaggacaaccaagacacccaggaagtactagaggacattctgacccgcgccataactagagaatacttagatcttttgaaagtcgctctggtaggcggcagtgtcactccggagtctaattcggaaacgatggagactgaggagcacagtatggattcccctacaccacctcatactagaactaatatgacaaatgaagttatttctgatttagggttaatgttgctgcgcagcgagaaaacgtgccattcgattgtgctggctgttctcggtgctttggcgtggatcgacagtcaggcttcattcaaggctactcttttaacaggtccaatagttagacagctagcctcggataagtccctcaacggcgaagtggcggctcacataatggcagcggtcctaaacgctctcacactgcacggacaacacgaatccaatcaaggttctctattgactttgggcgctcagatatacgaattactgcgaccatctttccttgaagttctcacggtgatgcagcagatacccggcgccaatccggtcgatttgcagaagttggacgaacgaatctctggaactacgagtaaagggaataaaatcgagaaggtcaaaaaggatttgttcaggaagatcaccggaaatttaataggaagaagcatgggccaattgttcaaaaaagaagtaaaaatccacgacttgcctcgaatagtagtacagaaaaagccggagcatgagcaagaagtgatcacaaatttacgaaccgttttcagttagtgaattgtacaattgttttagaatatgtatgtaatttattcgcattgaacttgtacaacattccgtgttgttcaattgagattgactggtaaaatcgtaataattgtgttatggactttatattattgattatatttgcctaatttttgtatatactttgttagtttatttataattcttttttgtttatgatcaaaataaagaatataatataattctgaaaaa

SEQ ID NO: 146 - DNA, 5456 bp, Spodoptera frugiperda
ctttgccgtacgtagctgtcatttgattgatggtggtgccgtatgtctcgcgagttttatttttaattatttttcttgaagtcatgttaatttaaccattaatgaaaacatgtcactcagggaaaatttatgtgaacttggctggcatctaagtgaagaaggtcttgatattgttagtgaaaatggtcaaatagaggatataaatattcttactaagaaagcgttagattatgatttaagagatataggggatgctgcgcttcctgaagactttactaaggagccatcgaagttagagaagccagtaatattgcaaatacagaaggtcagaaatgtgtcagctccgaaggctaatgaggagtctacatctgcccctcgaatgcttaagttaacgttacatgacggtaaatcgacatgtacgggcctagaaactagtcctataccaagtttaagtattaacactccgccgggtaccaaggtgttgttgaacaatgagggcctagaggtgtgtcacggtgtggtgtggttagtgcctgaagtcatatcagttttgggtggaaaggttactcacatgattgagaaatgggaactcaataggagtctcgctaagcatacaagaggaggcattggtgttgatggtggacccccaccatggatcccatttggacaaagactggaagctctaacattagagaaaaattacaagagtataacagaagctgctaaacaagataatgcagagtttgaagctcagaggaaaggtgccatcgctgaagctcaaaaattatcatccggtgttaaaaaggtctttggaggaggcactaaacccctgctggatgcaaatgttcagaagattgttgatgctggcttttcagaggaacaagctgagaatgctctcaaatatactaaaaacaatgtagatagggctcttaagattctacagaaaagagacaactctgagagcagaagtaaagagaaacagcaaaaggaacaggaaccacccaaacgcaagggacgaaacaaagataatgatgaggagatacaagtaaagccttcagggaaggtatcattatttgacttcttagaagataaactgcctaatgtacctgaaagggacagaagtaatcgccagaataactcacaagaggataggaatgatcggaataactacagggaaaggaatagtggcagaaacaattccagaaaccaggcagctaggtttgatggtggtaatagacaaagatctgatggaagagggcattattctcatgacaaccattctcatagggatgacagaaagtaccaagctcagagtgagaaaccaccacggttccagaggaaactagaagagaaaaataaacaacaacaacagcagcagtttcaacatcacaatcagaatcaattccaggctaacaaccttaacaatgtgaacatgcaatataacaattcatatcacaacttgccaccgcagcagcagagccactacaacgacaataaaaatatgcgaggcgagagaaattacaacaacgacaataaagcgcaaccaccgcagaactaccgcaacagtgcgcagagcaccatggagagcttagtggacgccacggccggcctcaacctgctggccacgcagcgcgccgtcgaggaactgcagcagccgcgcaactacccgccgctcgaacaggtctacgccaagcagcagcaggccgcctacctcgccgcgcaggccatgcccgagccgccgcccttccgccgcggcagcgacctgcagaagtaccaggagcagccgtaccagcgccgccagcagcccaacggctacgtagaatcgcggcagagcgggatgtacggcggcgtggccggctacatgggcggcgccgcggctgggggcttcgcggcgggtcgacagtacgggtacggcgcgcggccgcaggactacggcggcgtgcgcggcgcacccttcctggccaactccctgctaggcttccagaacgctgccgtcaacgagcaggcgcgcgccatgctcggggtcgcagacatcaactggaaggtgggcgaccgctgcctcgcactctactgggaggacaataatttctacgaggccgagatcacgggcatatcggccaagactgtagttgtcaagttctgtgcctacggtaatcacgaggagattctcaagaccaattgcctaccattccccaaccaaggtgcgtagtattatagtggtcgtgtcgcgacatctccagccgtaggttaaagaagaagaaagaaaacgtggtattttttattgagtccgtgtccagcgcgcgcgggtaggtcggcggtgcacgtcgctgtgtcgatagtccattgaggtggcgtggtcccgcagggtctgcggcggagggcgcgcagttcctggcgcagcgcggcgtgttcgcggcgcgccggccctagtgctgcgccgcggctccgcccgcgcccgcgcccgcgcggcccgccagctgacgccgcccactccgctagctgaacgtgcatccgaccgacctgccacacccacacatgtaacccacacacccgacacatcagacgcaacaggcagctacatggattttctttagatgtacctacttatcgaagtagttgcaaacattttaaggttggagctgcgatttcgttatcgttactgtcattatttcataagaacagaataggtatcttccacgtgtgcaataatgccatgtcagggaacttgtatgtaaaactaactttgtataaaatgctaaacggttaacataaatatcgaattgtaatatttcctgacaatgcatagcaggtttaagtgaaataagtctgttgactcggtaagacgctacacaatagttcggtcttatatcatttgaaagtatattctaaccgcagaacactttaacaaaacgatagtaaataattacttccatctgattactttgccacattaattattattatcgacatgcattttaatataagaaaggcaaatccaataccatatttgctacaatttcaagtttaactgaaaagactgaaaatgtaaagattttccaccaaacatcaaaccgctatttcttgcataatgtgcgttttatttcgtttactctacgcaacggtaacgattacatttgacacgcgattcgcgctccattaaatgaaatacttcaggtaccagctacatacacgccaatagatagtgcgagttcactcaatcacggtctctgggtggccggtatgactcggttgtatgttcagctccatttctagtttgggatgagtgaatgaagttgaaatatacttgcgatcgaagcgttcggtagttacactgaaggttctctctggcagtcatcattataatacctccttacaatgtatgtaataataaaataataagtacgtgttaaatgttcatattcaattccgtaaacacacgcggaagtttgtgagttttcaactttcttcacttaatgtataaagggaaatgaaagggctcacacgccgctgcgtagcttcttattttatacttgtacaaaggttttaatacatgcatatgcatattgaagaattataatcaaataatttgcatttatcttcttttaaaattatatatctattgttgtttcatttgatttgaagaaaaagcagatatattttagatatatctaagtagaagtagtaattaaggcatgcttttataaattactggacgattaaagttaggtttataaaaaaatgtgagttaaattataataattatgcacttgaaagagattggttgcatgtagcattgtaagcgttacgtcataacacttatgcccacaaagatgtgaatcattttattgtatttattgcatcagctcttgtcactcgtattagttgtgaaccagaggttcgtagtgccaagttatcgaattatgaatgctcttctatatttttatttgttttagtctaagaatcgggaatcgttaaaaaagtatttataaactattagaccatgtctgaaattataataattattatttattgttaagtatttctttgtgcaacatgtatattctaaactatgaagtctttgaggacttgtgaatctcgttctaggttcttataaggtagcttgttagctagcctccttacattgaaccgagtatttgtatctatatcagttcatgtcaggatgctcgactaacctaccattacattgcttttagttcagaattgaaggtcttgtttattattcgagtatatacgtgttgcacatttcgtcaatcaatttctaagagaagctacgcaggtcgttgtgtatctaggtctaattaaagcgttcttaatgtttaaatataggtaatgtaatattaaaaaaagatgtaactctgatgcgttaatttattgtcagtccgtatgtaaccaacagcagtagcgggttgcttgtataagtgtattttgttgtaattttagcgcaaaacatgtaatatattataatttcagttgaaatattgtttgaaatgtatttgttttattttatatccgtgtctaaataaatagatataaataattgtacctacgaaatcacctaccgtttactgcttcgtgtttatattaagttaacaacaaatgagatgtatctatagttttttctatgatggatttatatgcgacactaataattcgcacttgctacttattttaacgaagatttaaactcattagtgatagctgtgtcagctggtagcaggtgagaatatattgtgggatcaaataggatctgtgagttgtcccgagggactcacgctggtacactattcattatcgatttctattcgatatcatgttatatttcacaagttcaaagcactgggttgtctatttattgcatagtttcacatactatgaccttcgcgcgatcagggaggaacatgtaggtcttatgccttaggttttgtttagacttattcaaagatttgtataagacgggtatttttggtcatacatattatgtatagtttttgtaagtgtagataaatattatctaaatactcggtgaagtgtaacgatgtagtattgtccacatggacgcagtgacgtcttgtggtctgcctaaatattcttgacgaacggccttatgttcctatcttttagatgtttatagattaacgtttaagtagaatttaaacaatttgacgccacttttgttcgtgtgatgtttgcttggtcgcgcgcaggtcatattctcttgagtttttattctaaaacttatttactaaactgattgcaatatatcagaatataatttaatgtaaaccaaagctcaatgacatcttagttgttagtagacgcaggaatgctcatattgatgtaaaaccgcgttgaatacatttgtaccatcactttgtaattatgttgagttgaggtgaacgtttattaacaaaaagctaataaaagaaaccgtgaca

SEQ ID NO: 147 - DNA, 4360 bp, Spodoptera frugiperda
atacatgacagttttacgtttaacctgttgggaatagtgcactttgccagccattgatcaattaaaatatcataggtaacacagtttccaaggtaaattgactgtaatattattgcaaatcagtgaaaattaaaagtaaagacagtgataacgctaccacgtgaagtaagacgctgtcaaaatggggaagccaccaaaaaagaaaggaggaaaaaagaatgtacagaaagaagaagagccgtcacagagctctgtgtctgttgaggagccaacttctcctgatgtgccagaagcagaagtagaagacgactctaatctttcggcagcagctcgcaaaagaaaggagaaaaaagagaagaaggaaagatctttgcaagctttgcaagctctgcagggaatgaaaaaactatcaatatcagaatcttcaaaagacgaaccaagtgctaaagatgagtctacttgtaaagaggaaccaacttctaaggaggaggctagtaaacccgagcccgaaactcctacagaggcaccatcacaaactcaatcggaggctgcggctatgccgtcacaggagaaacctccaccagagacagccaaagaaccaccaaagccggctgaagaagaagaatttgggctaggtctgggcttatcaggcactagaaagaagaagcctaaaaagaaaaaggctgaaccagctccaacagctgaggcccagcaagcatcagctccacagacagcagatccccttaaagctacacccacatctccagcaggagctccagtcttggtgcagatgcctgaacctgcgcacgctgctgctcctggaccatggagcaagagtggatctggaaaaagccgtggatggactcccgtccctctaggcaccatgccagacccacccgcgaggctgattccgcaaccgacgccggtaccgcaagcgacgccgataccgcaatcgacgccaacggctgtggttcctactgcacgtgctcctaaatccatggaacctaccatgtgtcggtatcagataccaaacaaaattcccggtaaccgtgttcgggctgcccatataagagtgatggtcaactatttggaaatggaatttaaatcccttaaaatttatcgctatgacgttagcattacccctgacaaaccaaagaagatgttgcctgatgtatttttaaaagtgaaaaataagtttttcgctaatgaattaatagcgtttgatcagatgaagaactgttattcgttgaatgcacttaagaacattacgacgacagagcggttccatgccactgtcgagctactagatcagaatcaaagatcgataaattttgatgtttcactgaaagccacaggagtcgtcgatttggaaaacattaaaaattacatgagaacgcgcgcttcgtctctttgccatcctactgaggagatccaatgtattgacgttattttacgccagggggcgttggaatcgtacgttaaggctggccgtcaatttttcaaacgaccatcccgccccatagatttaggctttggttatgaaatgtggactggattgttccaatccgccatatttaccaataaagcctttatcaacattgatgtggcgcacaaaggcttcccaaggcaccagagtttgcttgatgccatgatcaaagatttcaacttggatcctaccaagccacttgataaccaacgtgggtgtgactatttcgctgcattcgttaaaggattgaaggtggttgctactctggtcggtaacacgccttctgctggtcatcgacgggagttcatctgtaacggcctggtgggcccaccccacgatcttgtattcactatcacagaatcagacggacgcactagaaagacatctgtcgcggaatatttcgcgaaagacaaaaattacaggctacggtacccaaggcttaattgtttgtgggtcggaaataaggacagatgcatttacttccccattgaactcttacatgtcgctgagggccaggcattaacaagacagttgaatgaacaacaaatatctaaaatggtcaaggaggctgccacacctcccgatgagcgcttgaagaaaatcaaagaagtgatttctaatatgaagtactcgcaaaaccgagatttcaaacggtttggattggagatttccgagaagttttacactgtcaaagctaaagtactggagcctcctgtcttggagattggaaacgggaaagtcactcctaggaaaggtcaatggcaagctaacaagctgttgaagcccgaagcacttacatcgtgggctctcatcgccgtcgacacggattccaggaatgattatggacccatgatcgatttgatcgttagtaccggaggacagttgggaatggctgtaagcaaacctaagtttgtcaatgtgaacgctaagatgaagatgttgcatagcattctgatgaatgcttaccgtgacgtccgcttcgtcttcataatcgtgtcggctagaggccgcgatgactatcataaggtgaagcaattggcggaacgtgaggtgggcattctgacgcaatgcatcaaggaggcgaccgcgcgccgtatgaaccagatgacagctaaaaacatacttctaaaggtgaactccaaactgatgggaataaaccaagccatcgacatgatcgccatgccgaaatgtataaaggacacgacagtgatgatcgtaggggctgacgtcacgcatccctcaccggatcagtcgaatgttcccagtatcgctgcagtgacagcctctatagatccgaaatgctatatgtataacatcgaattaagtatacaaactccaaagaaagagatgatagtggagtttgaagacatgatgttcgatcacctgaaggtatacaaagaccgcaaccaaggcagattgccgaagaagatatttgtattccgtgacggtgtatctgaggggcagttttcacaggtaatgaacagtgaattggcggcagtccatagcgcttaccagcgcatggcaggtatgcagaataagcccgaagtattgttcctattggtacagaaacggcatcatacgagattgttcaatgacggtcctaatgtccaatataacgtggaaccaggcacagtggtcgacacggatattgtgcactcgtctgaattagacttttatctcgtgtctcaccaagcaataaaaggcacggctcgtccgacccgctaccacaccgtctgcaatgacggcaagatccctgatgatgaagtggaacagctgacttactacctttgccacttatattcacggtgtatgcgatccgtgtcttaccctacgcctacctactatgcccatcttgcctgcctgagagcccgatcgcttactcatggcgaaaaattcgataatcgagaactggaacgtaaaccaaagcggcttcatgttctcgacaagatgctgcaattcagccgcatgttcttcgtttaataatattacctacacaatcctagaatagtgacggaatttatcagttttttatactctagatgtaccgtttataaaaaatgtaataatgcacacacaaaaaaaaatctaataaaaaatacaaaagaaatagaaatcagtgtatcacttgtgtagtgaaactatgtattttactagtccagtattcgaatcgtaacacaaaaattaaaaaaaaaatgtataaacgtgattttttgaggcccaatcgaaccagaggtttggttttatgtgataattaattgttttgtttacgtatatttattaaaatcacaatttctttttttttaaatctggtatcggcgacagagttccatctaccgttggacagggctccaaagacctcacgatgcgtgccggtagaaggagagctgccttcggtgtcaggctcttgatccatccgctaatttctgagatggcaatctgagtcttataactatactaactatagtctgattaacccattattggtcaacacaacagtctacataatggcagctacatccacatatcgacaactctttgccaagtcaagatatttgatgtttcggacgtcggaacgtcaaatatcttgacttgacatagcggggtgggttctagtctgtaaaacccaccccgttatgcctcacccaagacggaaggagacattgaatgaccctccccctcccctttcatgtgattcgtcgctcgaggtcgcagatcttatctttaaattgagatcgagctttttttaaagggggcataaattaaaattccatatcccgccctgggtgaggtgtcagggaatattcgactttaaatcataagaagtagttttagtttagttttaatcatttttaatgtttttgccttttgatttaa

SEQ ID NO: 148 - DNA, 5268 bp, Spodoptera frugiperda
aacaatctgctaccaacaagatcacacctgtatttgataattaacaaactaaacaaaaatatttaataattattattcagtttgctgtatagtgtttacacagtgtgttttatattacagctaccacgtgaagtaagacgctgtcaaaatggggaagccaccgaaaaagaaaggaggaaaaaagaatgtacagaaagaagaagagccgtcacagagctctgtgtctgttgaggagccaacttctccggatgtgccagaagcagaagtagaagacgattctaatctttcggcagcagctcgcaaaagaaaggagaaaaaagagaagaaggaaagatcattgcaagctttgcaagctctgcagggaatgaaaaaactatcaatatcgaatcttcaaaagacgaaccaagtgctaaagatgagtctatttgtaaagaggaaccgacttctaaggaggctagtaaaccggagcccgaaactcctacagaggcaccgtcacaaactcaatcggaggctgcggctatgccatcacaggacaaacctccaccagaggcagccaaagaaccaccaaagccggctgaagaagaagaatttgggctaggtctgggcttatcaggcactagaaagaaaaagcctaagaagaaaaaggctgaaccagctccaacagctgaggcccagcaagcatcagctccacagacagcagatccccttaaagctacacccacatctccagcaggagcgccagtcttggtgcagatgcctgaacctgcgcacgctgctgctcctggaccatggagcaagagtggatctggaaaaagccgtggatggactcccgtgcctctaggcaccatgcctgagccacccgcgaggctggttccgcaaccgacaccggtaccgcaagcgacgccgataccgcaacagccgccaacagctgtggttcctactgcacgtgctcctaaatccatggaacctaccatgtgtcggtatcaggtaccaaacaaaattcccggtaaccgtgttcgagctgcccatataagagtcatggtcaactatttggaaatggaatttaagtcccttaaaatttatcgctatgacgttagcattacgcctgacaaaccaaagaagatgttgccagatgtatttttaaaagtgaaaagtaagtttttcgctaatgaattaatagcgtttgatcagatgaagaactgttattcattgaatgctcttaagaacattacgacgacggagcggttccatgccactgtcgagctattagatcagaatcaaagatctataaattttgacgtttcactgaaagccacaggagtcgtcgatttggagaacattaaaaattacatgagaacgcgcgcttcgtctctttgccatcctactgaggagatccaatgtattgacgttattttacgccagggggcattggagtcgtatgttaaggctggccgtcaatttttcaaacgaccatctcgtcccatagatttgggctttggttatgaaatgtggacgggattgttccaatccgctatatttaccaataaagcctttatcaacattgatgtggcgcacaaaggcttcccaaggcaccagagtttgcttgatgccatggtcaaagatttcaacttggatcctaccaagccacttgataaccaacgtggatgtgactatttcgctgcattcgttaaaggattgaaggtggttgctactctggtcggtaacacgccatcggctggtcatcgtcgggagttcatctgtaacggcctggtgggcccaccgcacgatcttgtcttcactatcacagaatcagacggacgtactagaaagacatctgtcgcggaatatttcgctaaagacaaaaattacaggctgcggtacccaagacttaattgcttgtgggtcggaaataaggaccgatgcatttacttccccatcgaactcttacatgtcgctgagggccaggctttaacaaggcagttgaacgaacaacaaatatcgaaaatggtaaaggaggcagccacacctcccgatgagcgcttgaagaaaatcaaagaagtgatttctaatatgaagtactcgcaaaaccgagattttaaacggtttggattggagatttcggagaagttttacactgtcaaagctaaagtactggagcctcctgtcttggagattggaaacgggaaagtcactcctaggaaaggccaatggcaagctaacaagctgttgaagcctgaagcacttacgtcgtgggctctcatcgccgtcgacacggattccagaaacgattatggacccatgatcgatttgatcgttagtaccggaggacagttgggaatggccgtaaacaagcctaagtttatcaatgtgaacgctaagatgaagatgttgcatagcattctgatgaatgcttaccgtgacgtccgcttcgtcttcataatcgtgtcggctagaggccgcgatgactatcataaggtgaagcaattggcggaacgtgaggtgggcattctgacgcaatgcatcaaggaggcgaccgcgcgccgtatgaaccagatgacagctaagaacatacttctaaaggtgaactccaaactgatgggaataaaccaagccatcgacatgatcgccatgccgaaatgtataaaggacacggcagtgatgatcgtaggggctgacgtcacgcatccctcaccggatcagtcgaatgttcccagcatcgctgcagtgacagcctctatagacccgaaatgctatatgtataacatcgaattaagtatacaaactccaaagaaagagatgatcgtggagttcgaagacatgatgttcgatcacctgaaggtgtacaaagaccgcaaccaaggcagattgccgaagaagatatttgtgttccgtgacggtgtatctgaaggacagttttcacaggtaatgaacagtgaattggcggcagtccatagcgcttaccagcgcatggcaggtatgcagaataagcctgaagtcttgttcctattggtacagaaacggcatcatacgagattgtttaacgacggtcccaacgtccaatataacgtggaaccaggcacagtggtcgacacggatattgtgcattcgtctgaattggacttttatctcgtgtctcaccaagcaataaaaggcacggctcgtccgacgcgctaccacaccgtctgcaatgacggcaagatccctgatgatgaagtggaacagctgacttactacctttgccacttatattcacggtgtatgagatccgtgtcttaccctacgcctacctactacgcccatcttgcctgcctgagagcccgatcgcttactcatggcgaaaagttcgataatcgagaactggaacgtaaaccaaagcggcttcatgttctcgacaagatgctgcaattcagccgcatgttcttcgtttaataatattataatagtgctacacaatcttagaatagtgacggaatttatcatttttttatactctagatgtaccctttataaagaaatgtaatgcacacagaaaaatacaaaaaaaaactaataaaaaatacaaaagaaaaagaaatagaaatcagtgtatcacttgtgcagtgaaactatgtattttactagtccagtattcgaatcgtaacacaaaaattaaaaaaaaaatgtataaacgtgactttttgaggcccaatcgaaccagaggtttggttttatgtgataattaattgttttgtttacgtatatttattaaaatcactagttcttttattaaaaatctggcatcggcgactaagttccatctaccgttggacagggctccaaagacctcacgatgcgtgccggttgaaggagaattgccttcggtgtcagcctcttgatccaatcgctaatttctgagatggcaatctgagttttaagattaacccattattggtcaacacaacagtctgcataatgaccgctacatccacatatcgacaactctttgccacgtcaagatatttgatgttccggacgtcggaatatcaaatatcttgacttgacatagcgggatgggttcgagtctgtaaaacccaccccgctatgcctcacccaagacgggaggagtcattgaatgaccctaccccgtcccccttttatgtgattcgtcgctcgaggtcgcagatcttatctttaaattcaggttgagcattttttaaagggggcaaaaattaaaataccatattccgccctgggtgaggtatcagggaatatcagactttaaatcataagaagtagttttagtttaattttaataatttttaatgtttttgccttttgatttactttacttaattttcataagtgtgatgtactttttcagtttgattcaatgtttgtgtcaaattgaaataacgtttgtatttaaaagttttggattaaaatatttcattcactgctaattttaggacataaaaccaatgtgtcaatgtcttaatataatggttagacctagttttcataagactagtaagtgcctcctgatcttgaagcaaatacaatgagatgtcgtaactggatttatctttaacataatgcgtgacactttacggggagcgcgggatgttacacaccacgcacccctctattttccatccagcggtctaatactacaaaaatgttgccaattgttcacattttaatgtgacactttctgagcgctgctatatataggttaggagacctatctacaccattttacttataacatcattgggcatggcacatcttttgagtcacagtacacaatgacaatatggcatctcctctttgtacttgcttcatggtctgatagccacgatgtaccaaatgtgtaggacatattttatatgaactatttgtcacataagtttattgggtacttatatgaaagtggtgaaacaggcgccaggctcaatattcgacactagcttatttgcaatagagtagattttcacagattaaaatatttttgcgatgatatttcaagtccgtgtgagagcaataatcgggtttaatcattttcatccttatttatatgtatttagagttcattaaagcaagatccgcctttcgctagatctgtgcaaaattttaagttttaatttatcagaatgaaaacgtaagtatgttgctaagctcaaaactcaggaatgactgcaccggtttcgatttttttattttttttaaataaaacgttgccccacactaggattttctcctgtgtcgtgggtgcgtttacaaacatacaag

SEQ ID NO: 149 - DNA, 5135 bp, Spodoptera frugiperda
ttcattatcattatctgttttagtctatggacggctttcatttcgctatcgtttcgtttcttaatttcttctgctttctattttattgttaggcttaattacaagcctgaatctagtttttcggtattctaatcagttaaaatggctgatagtgatgatgagtacgatcgcaaaaggcgagataaattccgtggtgaacgcggcactgctgaaggtagcagttatcgaagtagtgaccgacgcgaagagagaagtcgtggccgcgaagactggtctgagagatctcgtggaggtcgctctggtcctgactacagggactatcgtggaggagccagcgccagcaggggatactcaccagtcagaggagaaggtccaccaaccaaacgcattagacctgattggcctattgatgacagaagatatgggggtatgccacatgactcatatgggtatggttggcctcatgatcattttggtcctcatctggcccaccagggttatgggcaacctatggcccctgtcccagccagggatgcagtcatgcccttaggagcaacagatggccctcccacgatgatgtcattcaaggcatttcttgcagctcaagatgattccataacagtggatgatgccatccagaagtacaatgaatacaagctcgagtttaggagacaacaacttaatgagtttttcgttgctcataaagacgaggaatggttcaagatcaaatatcatcctgaagaatccataaaacgcaaagaagagcaacttgcggcattaaagaatcgactcaatgtatttcttgagttgttggagaaaggagaactggataaagtgtcagtagacattgacaagtctgacaaattgatcaggcttctggacactgtggtcatcaagttagaaggtggcactgaagaagatttaaaagagctggatgaacccccaccacaggaaaatgctacttcaaatgataaagcagacaaaactgattctgacaaaccagttgttatagatgttgatgatgtgaaggttaaagaagagaaggaagaagacaagaaagaagagaaaaaagcgcccgagtctccgaaaccgacagcgccattgaccatggagattgatcctcatttacgtcaactacaggagcaggcgaaattgttctctcgcttcaactctacaggaaccgaacctgagcaggaggaagtgaaggaaaaggagaaagaacctccaccaccagggtcttcatccagttcttcttcatctagttcatcgtcgtccagttctgaagatgagggtgaatctaccactcgtcggaagtcgaagtctaagtccaagacgcctgataaatctcccaaacaacaggaaaaagctaaatccaagtcacctagtgtagagaaaatggttacaaataacactgaaaatgacaaggacaaagaaaaaagtggagacgagaaagctgagtcagtcagtgacgtcgttatggagaaaaaagagagtcgcgccctacacaaaacaacttccatatttttaaggaatttggcgcctaccatcaccaaggccgaagttgaagctatgtgcaagcgttacggcggtttcctccgtgtggctctggctgatcctttaccggaacgtcgctggttccgtcgcggatgggtcactttccgccgcgatgtcaatatcaaagatatctgctggaatcttaacaacatcagacttcgcgagtgtgaattgggtgctatagtcaaccgtgacctgcaacgtcgtatccgcccagtgtctggcattaccctagagcgacccgtgctacgtgctgacgctaggttggccgcgagactcgcacatttgttggatacacgcacaaaactgtggcaagaaagctccgacgaacaaaataatgacgaccaggccaaccgtaatgagaccttcagcttaaattcaaagaacccggttctccataaaataacggagcatttaatagaagaagcttcaacggaagaagaagaattactgggtctcgaagcttcatcagaatctgcggtttctgaacaacctgacccagagctcattcgagttcttgaccgtcttgtactttacttgcgtatcgtacattctgtggattattacaaccattgtgaatacccatatgaagatgaaatgcctaaccgctgtggtattatgcacgcgagatccggacctcccgctaataagcccactcaacaagaaatacaagactatgtgaagacatttgaaggcaaaatgtctgcgttcttacaagatgttaaaccactatctgacgaagagttgcaaaaacttggaatcaaggatactgacgccgaagtagaaaagtttattcttgccaatacacaagagttggcgaaggacaaatggttgtgtcctctcagtggcaagaagttcaaaggtcctgatttcatcagaaaacacatcttcaacaaacatggtgaaaaggtggaggaggtgcggcgcgaggtggcgtacttcaactcgtacgtgcgcgacgtgcggcggccgcagcagcccgagccggccgcgcgctcccagccgcagcccgcgcacccgccgccgccgcaacccaggtacgctggcgggccgggcgggccgggtgggccgggcgctgggcctgcttccgcccgcggctggggctggggcggctgggccccacctgcagcatacgctcctagacatccacgcttctctagaccaaggtaacattaccacccatcatagacttgctttgacttcattaactcgttatgcggcttttacaaacgaaacgtatagatgtgtacgaattttgaacatacatataagtaagaaatggtcacttgtaacacgaaaataagaagaaattcgttagtcaaagccctatgtcattccatttcatgaacaaattctaaaataaactcgtattattacgagtttacttttatatagatttaactttttacttatacgcaattctcatagttttattattcgttgttcgactggttcaagaagtggaataagaattatattatttttgcatcttgcttttatgggtatgcttttgtagatatcacataattttatgttttttataatactgcataatatctttgaaaatacgaggtacgatacgcgaaaaagtatggccgctttaaaggaaatacctatctacaattcaactaggaaaaaatagacactaaatccaaaataatattatcattcggttgaaaataaaatacatagtatgtataaatataacgaaaagttaggtaacgcatgttttaattgtaattttcaagggaacaaaaggtttttagtcgaccatcaaaatatgcagatttaaattcacgatgcatagatgcagtgtaacgattcacagtctagaattgtaataggacatattagatcattggcagacacgatttaccaataacaatagcatttctgtctgctattgacttagatgtgcaccgaattgtatttaaatgtctttcgacaacattgtaactttgactaaaagattaccatgtatgtaatacatcgtctatgtaccctgtattttgacgtaaaattagctttctttatatatcttcgagcttttacatccatctccatttcgttagaattaggtactctttgcgtagacaatttacatccgtgtgtaacaggattattcaagcaattgtaaacctaattgcgaatattacttagaagacacaacatcgttgtttcatacgttaccaagtcataaaaacacataatgcaaactttatttctgtttcttagtaaatatgaaatgtgatttaaataaacttaacgagctgatgttatctgcataaaaatatttggtagtccgaatattgtactcacccgtattcggaatcaatcaatatttaccattacttaacatgcaatgcattaatgttctatcatatgtttaccacttccataaataccttatgtaattagaatacctgtttacggttcggtaggataataaattgtataacgaagtctctatcttttgtaacgacgtgtgattaagctcgtcactttttaagataaaataaatattattccaaatctttaaactagataaatcaaagattattttattgtagggggaagttggtagttcttaagtaggaagtgggattttggttaatagttcacatttttgcatgatcttaacattttaatttatttattatctttgtttcactaacaattatatattaatatatattgctttattattactatggctatggtttaatctgggtgtttgcaactttttggggtcattaattcattacaaaagcatactcgaaacgacaatttgaaatgtcacatagcaaatttaaccctatctctgcaaagtaattccatgtgttatttctgatatgaagttaacgtgctttaattgaccaaggtaagggtgaatatgctttgtgacattttgattcgacacggctttgtctctgctctggtttgcattaactcaagctaacattatggcttcgcatcctttaaattattcgcttacagcgtttgcgatgtacattttctaagttgtaagaaataatttacagggaaaatgtggaccggtcccggcctattattgcatacaacgatcttgacttcccggacagtggtgacatattctaaacatgcatgcaaatgacattatacaacaagtttgtagatttttattgttatcataagcattccgttatacccggttttttcagttggattaactgatacacacatgtaaaatatttacacaattatactttataaatttgtataaaattgctaaattattttaatcaaaaattatgtacttgattttaaataagcatgtttcgtaaatgtcattatattttatgcaatgttaactggaactattttagatgtaggtataataaaaatctattcaaataaatgaaaatgttataataaatgactgtgaaaataatttcaaacttccatcatctcatataaatccttttagtcctttttgtatctaacaataatcttaaagggatacattttatatgtttacaatattgtcttctaccatgatatttattgtatgtttttttaataaactgtccgaaattttaacg

SEQ ID NO: 150 - DNA, 2921 bp, Spodoptera frugiperda
caggaaaaggaagccaagcttaaattgacgaaaagtttactttatttattttaaaatttattatctcaatatttgaaggtgactagttaatcaaataataaaaatttacaattcataaggtgtacatatttgtatgctataaaatatggctgatagtgatgatgaatatgatagaaaacgccgagataaattccgaggagaaagagcagaagctagttatagaggtgctgaaagggtagcaagaccaagggacgaatgggcagaaagagattcatggtctcgtcctagaccaagggaatatagaagcagtgttcgtgatagaggatattcgcccaatatggagccagctcccaaaagaattcgtcatgattattacggaggaggcggcggagatggttattataaccattatggggttaatacttaccatcagccagcctacagagaatcgatgggtgctcataccgaaggccaacaaccacctatgatgtcttttaaggcttttttagctactcaagatgataacatttctgatagcgaggctatagaaaagtacaatgattataaactagaatttcaacgtcagcagcttaacgaattttttgtggctcataaagatgatgagtggtttagacttaagtatcacccagaagaatctgtaaaacgaaaagaagagcaaaaggcagctttgaagagaagagttgacgtctttatagagcttttaaatgctggcaaaatagaatgtgttaaggtggattgtgcggaaaccaataaattacttaaattactagatactgttgttatcaaacttgagggaggtaccgatgaggatttggctgctcttgaacaagagtatgaagaaatggaacaaaaatacagagaacaaaaagcgaaagaagccgaagctgaacgagaaaaaggcaaagatcaagaaattaaaaaagagttagaaggcgaaaatccaaaacctgtcgatgaagagaagccaaatggtaaagccgatgacaatgaaaaagagaaggagagaaagatgaggaaattgagaaagtagaagataagatagaagctgaatctgaacctcaacccgaaattgaaacaataccttcagaagacatagaaaatgagaacactgaggaaaaggagtgtgaagctggagaagttcaagataaaccaacagaaggtgaagcgccaacaatagttgttgaagaaacagaaaaaacggaagaaaatcttgaacccgctgctatggatactacagatgcaccagagaaagacggggaaaaagcggttccttttaaaactaaagagaaaaaacggaaacgatcatattctggtagcagcagcggttcttccagcagtagtagcgacagtgaaaatgagggtatagataaggatgctaaagaagaggatgtcgaagccgacaacaacaaaagggataaggatatcccagttcatactattgatgaggacgatagactcaaaattgaaaagccaaaatctcttcataaaactacttcgatattcttgagaaacttggcacctattattaccaaacaagaagtagaagccatgtgttctagatatgatggttttcttcgtgtggcattagctgaccctcagcctgacagaaggtggctgcgacggggatgggtgacattcaaacgtgatgctaacataaaagaaatatgttggaacttaaacaacatacgtttgaaagaatgcgaattgggtgctatcgtaaatagagatcttagtcgaagaattcgtccagtgaatggaatcatagcccataaacaggtcgtgagatcagatataagaatatctgctaaggttgttttacacttagataccaaagcaggattgtggttggagaatgaagataagaaagctaagccccaacagacttttggactattatccaataatccagtattacataatataactgattacttaatagaagaagccagcgctgaagaagaggaacttctaggtttagatcctacaacagatgcccaagatgctacatctgtagttgaaagagatgaaaatttgataactgttttggataggattattctatatcttagaatagtacattctgtcgattactacaatcattgtgactatccgaatgaagatgaaatgcccaatagatgtggaattttacatgcccgagggcctccaccgactagtaagaccgatatgacccagtttattggtttgcccatagaaaataaaatggctgccttcttaccagaaaaactacatcaagaaaaagacaagaacgaatcgaagttagttcatttggcgttaaagaacgtagatacagaaattgataaatttgttcaagttaatacaagagaattggccaaggataagtggttgtgcccgttatctggaaagaaatttaaaggtccagattttgttcggaaacacatatttaataaacatgctgagaaacttgtagaagtaagaaaagaagtcgaattctttaataactacctaaaagatcccaaaagaccaatgttagcagaagctcctcaacaaaaaagggaagaacctgctagttatccacatatgtttggtggtggtggatatggtggttctgggtacactagacctgctccattttacaatcaaagtttcgttccgagaacaagaggttaccaaccaagaggaaggggaggcccaacagatttcagaccagttatccattacagagatctagacgccccaagagaaccagaagaatttatttgattgatgtatttgttttaatattaggtggcagtttttttattaatttgcttcttcctaaagatatctaaatggatttttccaatgttaatgtattagttcaggatgatttttatatcgattatgcttttagtagttaataaagcattcacgtacaaaaa

SEQ ID NO: 151 - DNA, 11022 bp, Spodoptera frugiperda
ctgagaatgtcaagtcaattttcaataaaaacaaaaggtgaagtttacagggtacctattcatttcatttattatgttctctctacagtgagtggaatagacgtgtcggtttaagtgcattttaaagtattattaacatttcttgcatcatctactttaaaagacttaacagatttatagaagatggaagtggacgagtatacagaggctggagaccagctcaaggcaaggccttaccaagcccaacttgaagaaattgccgataaacataatactatcatttacttaccaacaggttctggtaaaacatatattgcagtttgtctcattaaaagatttcgtcaagcattgctaaaaccatggggacgaggagggaagcggactttctttctggtcaacaatgtaccattggtaaaccaacagaaaaaagtaatcgaacaacgctgtgctgtcactgttggtggttacagcggtgaagacggggtagattactgggacaaagccaaatgggacactgagctagaaacgaatcaggtaattgtaatgaccagtcagattctatgcgacatgctgacccatcaatacattaggattgaagacataaacttcttaatattcgacgaatgtcaccacgcagtcgtcgatcatcctatgcggctcgttatgaaacatttcgagaactgcccggtagacgaccaacctcgagtcctaggtttgacagcgacacttttgaatgcaaatgttaagacatcaagagtagaagatactctccgcgagttggagataacattccatgcaaagattgccacagtcgatgagctcggacaagtcttagattactctacgaatccaaatgaaatggtgcagttctaccggagcctaacaccgtccccggtatccaatgatgttattacccaactgacgaagctacagctactaatccacgaaattaagttgcctaacccttcccctacacacactagacaacttaaagagtggcagaaagaaatgactactagtcccacgaagattgtgaaagcagtaagtaatatggtagcagccatgataatgtttatagaggaactaggtctatatggcggttccttgggcattttgtcgtacatagtcttattagaacgcttaaaacgaaaagctgtgactaaggaagaggaacttctttataaagtgactataacgcattgtataaaagcacgggccacattattatcagcaatggaatcggatacgggatacgagaaaataataaaatattcatctgaaaaagtgttactgatgttaaatatattgaaagaatataatccagctataatggatacacccggagtcctactaaaagtgaataaacacaggaagcctctatcagccataatatttacgaagcaaaggtttaccgcgaaggttttattcaatcttttaaaagatgtgaaagatacgaatcccgaggagtttggttttctaaaacacgatttcgttgttggtttcaacgtgaacccattgaagaacacgagggaagagtactatgtcaagaagtgtagccataaagcgttattgaagtttaagaacaatgacttgaactgtttgatttcgacgagcgttatagaagaaggaatagacataccacagtgtctgctagtagttcgctacgacccacccttagagtaccggtcatatatacagagcaaaggccgtgcgagaagtagcgagtcaagcttcgttatattagtaaacgaagaaaataaaaagaagttcatgaaaagctacgaagacttccagtatacagagagactgatacaaaggatacttgttggtaacagtgactatcgtagcgagccgactacagcggagatcgctcgcgaactgtacaaagacgaagacgtgccgccatttgttacaccgtatggagctcggttgtcttcagtgtcagctataagtttactgaatagatactgctcagtactcccacacgatcagttcacggttatcacaccaatgtggattcaagaagacgtcctagataatcacggctcacgaaaacttgtcacaatcgtaatgccaatcgcttgtcctattaaagaagaaataaagggattacctagattcagtttgaaggccgcaaagagatcagcagctctaaatgcttgcaagttattgtatgaagcaggagaacttgatgcactcacactactgcccaaccgatacactgaagttgatttcgacgacgaacaagtgaaaacatgcttcctaaattggcgcgacgaagatgtgggtcgtgacgaccctgaaataccttacccagggacaaagaaacgggttaggaaacatagaatacagttcccaatacttctgaacagtgtgccagacgaaaacgtttactatctacacataataaggtcgaaaactgcgttcgcggagcccaaggatactcgagagaatgctttgtataagctcctgcagcgcggtgaagggtatggtttcttaacccaaaaccctttgcccacactctgcgagtttccaatgttcatgtcagtcggagaggtcgccacttccattgaagttaactacgctgtcatcaaactcaacgctgctatgttccagttggtcaaaaaattccattacttcctattcgagcaagtactagcaatagctaaaaaattcgttgcgtttgaaggtgcagtcaattgtatgtacgttgtgcccgtcaaagaagacaatggttacgatatagattggagtgtaatgaccacacatgaagaaattgcaccagttcaaccaacttcttatgaggaaagactgtttataaatgtcacaccagagaattacaaggactgtgtcgtgacgccgtggtatagagttctaccggacaggtacatcgtatctcgtgtcctcgaacatatgacgccgcagtctcaattcgactcggactcttacttaacgtttgccgactactatgctgacaaatacaaattggaagttatcggtgaaaaatcacaacctttgctggaagtaaaaaacataagttcaaggatgaactgtttgctgcctagagcggccacaataaatgctttgacggacaaacagaagaagcttgtgtctgcttctcaaggcgacgataaaacaaacaggggcttcgcagaagtatttgtcgctgaattctgtgtcaaatacgaatatccaggagtactgtggtacaaggctatcatgttacccagcattatacacagggtgttcatgttattggtatcacacgaactgctctcggaaattgccgatgacacgggatatggcactccagtacgcaaaaatactgaagattggcttccgataaaaactcacattcaagttgctaccaattccctgctagcccaagttgaagaaccacctcaagtcgcttcagttgacaggataaacaatcctatagatgatgaaagcggaagacgtccaaagatactttctatgaaggaaagcttatatcatttgcaacagaagagacttaacaaggagtttccttgggacgacaaatcggagccgatagacatagaccgtaatctatcgactgtgaccttgttggatgtggagtgttacgacgagtttgtttcgactccattagtaactaccttggaatatgacgtgcgacccccagcccaaactgtgttcccctccaccgctatatctgctccaccagctgaatacaacgatcggattgagatcctcaaaaggacgaccaaaggcactagtcctgagttaagagacatattagcagcactaacaactatcaaatcacatgacacgttcaatttagaacgtgttgagaccttaggagactccttcctgaaatttgcagccagtctctacctataccataagttcccgaccctcaatgaaggacagctaacaaatataaaaggccgattgattagtaacagaaacctttactatgctggagaaaggttcaatctggctggtaggatgaagatagaacaatttagtccgaggaaagattttatggtgcctggcttcttcgcgccgcaagaagtcgaaaaattcataaacgaaaagcagatccgtccaatattcctgattggtgtgcagttcccaagagacgaactccttgacggtgcgttgtctgaagatagtatgagcatggtgagagacaaatttgcaaacgacagtactgcggagattgaaccaccagagaaggttcagaacgctatgcaactgtacgtgcattctcaagctgttgcagataagtccgttgccgattgcgtggaagcgctcatcggtacctatcttttaagcggcggtgtattaggtgctgtcaaagtgatcgagtggatgagaatcatacctccacaggacgaatttgctgaatatttacacaggcgtgtgtctactgccatcacagacaaaatgaccactccagaagatatcaacttcttactgaactattctaggaatgatgtggaaacgattttgaactataagttcaatgacccctcattcttattggaggcattgtctcacgcttcatatattcgcaacagagtgacgcgttcctacgaacgcctagagtttcttggcgatgcgatattggacttcctaataacatcacacatattcgaaaactgccgggaattgaagcctggtgagatgacagacttaagatcagcactcgtcaataatgttaccttcgcatcttatgtcgtcaaacttgggttacacaaatttctatgttccgaactgaatccgacgttagacaacgctattataatgtttgtggaccaccaagtgcagaggaaccacgagattgttgaagatgtcctttatttgcttgacgaggaagaatgcatcatcgccgaatatgtcgaagtccctaaggtcctcagcgatatattagaggcactaatcggtgcaatttacctggacaccggcggtgacctctcaaaagtgtggtctgttatatacggtatcatgcataaggaaatacatttgttctccagccgtatcccacagcagcctgtcaaagtgttatatgagaaaattcacgcttgtcctgtctttgggaaagcagtagtaatcgatcgtgaggtgcaaaagataaaagtgggcgttacaatcactaagaatgatgcccagcacactgtttatggcatcggtcgcaacaaatctcaagccaagcgagctgcggccaaaatggcgctaaaggtcttaagcagtttttaaaatctcccgcctttttctgaggcagagatatttgcatctacttttagctagatacagaccataatttctactcgtttatgttattatttttattcatttttatctcaaacgaaattcgcgtataccaaatgaaattttaagaaagtttatttcctcggatatatttatttatttactagctattattgcgcggtctcaaccgctgcttggctcttatttatctgaaagtgatgttttatagcctttctcgataagtggattacccaacacaaaaagaatagttaaattggaatcagtagttccggagatctgcgcgttcaaaaaatcttttcaagtataaaagtaaagattatttttttacaattaactacatacatataatatgttaatgtaggtacatattattaattattattgtacgaagcagacttaatcctagaagtaatgtttttttatctcaaaatagttatttactttgtaattgttataactattatactattttagaaatacaatatgctttttagtcacctatgtagaagcaatatttttatttcgtttattgttattagacttggatattccgcctttacggtttgtatgaaggctgaaaaaagaacctattattataatatttttgtatcaaattaaattgcattgtaccagacgataaatattgaatagaaacattgtataataataatatgatcatttatttatacaaaagttattctttttatttttttttaaggaaagtgctcgactagcttgtctaaattgacttgacttggtcgacagtatctttccaaaggtagatgtgcaatatttatcgccaagtaggtactgtacttaggccttagtacgagtttgttttacgtataacaagatcgaaacaataagcgttcgctgattaattggttggttcattggagtcgaccaatcagagcaccgaacacggtctcgtttggatttcgttaaacgcaaaacaaactcgtactaagccatttgtggtttgttcttacattgcttgtttagcaatgctttagagacagaatttaatagtcaccattgtattaatataaggtttaattgggaaatagaaatcacagaaaagcttttattgcttgtttacaatttaaataaatttagatattgttatcgctagaataagccaatttaatttctggcttgtttcacaatttccaacgaaattcatttaattaactagtctaatggcgcatttacattagtcggttagaccgtattcaccaactaatataaacaggtattcgtttggccgtattaattcggtttcggttaaaccgaatgcggccgccgccttcggtgaccgacctaatgtaaacgcgccataatgaaggttttgacctatttttcaatgtgaaatgtgttaaaatgagctaacagcaagtcaacgagactctgaaacaggcccaaagtttaattggaaccaagtaggtagttaatataaatgtaacaatttgcatgataagattttgcatggaaggtgaccagaaaatgtgtgatacgtttgaacgtacagggaatgttataatattagaattttttactaaaaggaaccactcaaatgttccttgaaaagtacgcgaatgagaacaatgaaatggatttttattttaacacatattggctgtcgcccgcggagaataatgactttaggattttattattctctctgatagaatttaggattttattattttattactcattagtacatcagctacccgtcaaaatcactccagccatttcagagattcaccagaacaaacggacagacagacagacagacaaaaatcgtaaaaaatattttggtgtatggtatcggtatgtatgtttatgcatgtagtaaaaagcggttatttaaatattaaaaacagtccaattttattaattagtctagatgtgtttatgtttttgtttgtacatttgtagatatcctatatttgataggaagttaatgtatctggtaaactttgtaaaatccaacactaataacatacccacctccttcttaattagatttagcagtatgtgcttctgatttccaatgctatgaaaatttagtgaaataaacatgaattgcataataaaaacataaaaaaattaaatcgccgaaatatttctagtgcctctgtattttttattgtatttgatattaatttacctaattgtatttgcatgtaaatcatctctgtaatacttttattttgctactggaaaattccacagactatttcatttttaagtaattgtgatgtggtaaaattaaaatgaaaaatctaataaaaaataaatgtattgaagttttaaaaaaacgtttttgattgtggaaataaaccaatacttacagatttcagtcgctgacgcgcataaatccctgactaataataatattcacatagttctgtttgtctatagggagcaatagtttttaaataaaattatgacataactttttatctacatttttgcgtaagaatttaatagatttgtatgttcagaatataataatcatacttgttattgtcaataaaaaataagaaactcattctgtaattttattttacaattagtttgataattattaatggaattatctcacaagccttcaatttaaggacaataaaagaaaagtatttaaaagcagtggtgctttgtcctcacgaaagtttccatgttctatttacctatcttgagttttacagtttgtataaaaccctcatgtaaatcaaaatccgtcaatgtgtgccccacagacaattttctagtgtctaaccattggacggttagacactaacagtaatttatcaaataggacctcacataacattagcactttcagtattgacatcaaatgcgcagctagagctgtcgcttcgttttgatgaagcaacaacttctttgaattggtgtactggacgaaacattaaaataaaatagaatatttttgttcccacatcaggatgtggattttaatgttattattacagcatacataataaaattagaggaagtaggtgctgggcctcttgtatgcgaaggtgttgaggcgcttgtggtggtgcacgcgcttgggcagagggaatctgattgtgctgttgtggaactgcttcacctgtggccggcggcacgcagacgccttgatgacctccactttgatgatctataaataagaaaataaatattacaatcaaataatacagatataatttacgacggtacatggcagttatagtagtaggtgaaatcatactaagattactactacactactatcactacaaaagtcgtaaagaaataggtgatacaaaaagcctactttttttgtcaggtaatatacctaaaaccttcttctaagtctgaaaaatactatgctgaaaaccgcatcataatcggttcaaccaaacgcgaggtaatcgcacacaaacattcatacatacaggtcaaaatgagaacctctttttttaagtcaaatacatggatgggaggggtttaattatgtataactattaaaacaaaggacagagtaaaataactattgaaatacctgaggcatattattttattctagccttctgtataagatgtcccaggctcaattctcagatagaataaatgtgtatctacacacaaagccctaacatttggcaacatcataaaacaataaccaaacattatgataatgataaagtctaaaacttccctaaaaaaagaatatcttttatttggttttatttttttcaaaatcaaataataataattaacataaacattgaaccagcatatttcaaactactatacaaaatagctctaaaattttgcaagatgaatgaataatcatagttagttacctggatggagtgagcacgggctctgtgcctggctcccatgtcacggtagcactgagtgacggcacctccgacactgaggtcacggtactcgcggtacatgttgtgtacacctgagcgagactcataacgcagccagatgccaaagttcttgatcttcactgggctcttctctgggatttcctggaaatgaaaatgataaattccattttatacaacaatgtttttaattttcggcagcatgattttagattaattgtggtcattcggttggccattaacatcatattttattcccctaataaacatcaaatattttattccctaaagtaggcaagcatctgcttatcataaaattagttgaaaactgtctactctacataatccaaagagaggtacctcattagtaccattatttttattgtcatatagtgtaattacactacattttagaatatccattttgtgtgagctctcattcaatgaatctgtttgctactagctttccgcctgcagcttcagcttcagattaaaaaaaattatgcattaatcttttgtttacaaaagacctcataccaatttatagcttactatattgaaaattgtagaatgttccatgcatacttccatccctcataataggaaagttgggggttagaaagagacaaaaagtagagcatatctctctagccccccaattaacttcacacaagaaatcttaccacaaactcacttcattgcaacatgaagaaaggacaaacacacacactttcccatttataatattagtatggatgtaagccaatctaataaatgtaactaaagcatggtagaggaagaattatctgttgacaatatttatcacatctgattactatctcatggacactcatggagtaagaataattaaaacaaaatgctaggttcagaatgcaatacaaaacaaccaatttccattgaatacatcattgtaactagctatgtgtttactcattttgatagatactaataagaaagcccattaattaaaccttttaccataaagtaatgagtacagatgccaacctcaatgagttaggagaaaaaagtttgcactatcaggaaaaaataaaatacattttactcactataaaaattattacactctaaataaagacactatactaaccctgatagagacgatttcaccagtggtcttcttgaacttcttcaattgacgcaagaagtaccagaaacgggacttagccacaatctggtctggagagaagatcctcatcttgtatagaggaggcttgggctcgctctccgaagggagcttgcggccgatgacctcatactccttcaactgcaacaaatgtttacacatgaaaccatgcttacctccaagtccttaggatggaactcacgttactttacgatcattggctgaaacgaccacaaaactttagtactttgttcgaaggataaaataaatctaatttctttctgtttgtctttataatcttgaagataaacgataaaataattgggacatagcgaccgcatcacaacatgacataacctaaaagcgcatttatttttctggccatttttgtaaatccaggcactaagggcaaagataattttttcgagttaattaattttgaataaatattgtatttatattcactaacataataaactgagaaatatcaaataaactaatttcaaaagactgcaccgacaacgtgtacgccacactccgtcaaacatttacactttttaaccaccgtttttcatgttagaggcactgataatggtttattgttaaacatttttgattttaatgcacatttttcacatattttctatattttttcgagacttacctctcctttagccttcattttcg

SEQ ID NO: 152 - DNA, 3066 bp, Spodoptera frugiperda
taaacatgtgaacatcatggcattgtcggccactttagtttcccaactaaactagagagataaatacattaagtcacaacatttgaaatctccagtcttaaccgtgaatcatgatcgttgctcttcagactttggtttttttccgtgaatctttactgtcggcattggacagtttgttacggccttactataagcacttgactttagcttttacccggagtgggaatgttttggaggatgaggaatctgatgaccaagtgttcgcggagtatgacgatgagaaaggtgttgtatttttcccgccaatgtacgctcagcggtatgccgcagttagcgactggttaatggatgatcgttggtgtgggaagctcgagaaggtagtggattttggccaccatgacatgagttttatcaagtatttgaaagaggttcctggcatccgttacattcttggtgttgacattgagaccattcctctgagatgttcttctgatctacttggtggtgatgagtattctccgaagagggagagccctttgcaagtcactctcttccaaggtaatgcagcagatccagattaccgtctaatcggctgtgatgctgttgttgcaatcgagatgatagaacacatgcttcctcatgacctggaaagactggttcacactgtatttggattcattaaaccctggattgtcatcttcactacacccaatgcagatttcaatgtcttgttcaaggctttggagaagaatggtctccgacgtatggatcatttctttgaatggactagggagcagtttaatgattggtgcagtaacatagtagttaggtatcctaactacacagtgacctgccagggcataggtccgggaccgccggggactttgcacctcggctgctgcagccaactctctttgttcatttccaaaaactaccataagcaggcagatctcaatatcaacagtttggctttggttgaaaatgcaccgagtcccaataactttagcgacctatttggatgttgcgacagttcggtgggtactaggcaggaagtcgaacgtggaacgtctagaacaaaacaaaggttaaactgctcaacgctacaagtgaaaaagttttcgaagaccacgcagaatttgatggccaaaaacaagatagactctctagtccacaccagggaggtggtggacgagatccgacacctcactaaaacgttgaacttcaataagttcagtcgacctgaagatgggagtcatatctggaacaacatcaattggggtgacaacgcgccgtactggaaccagtattataaaatagttagagagtgcatctatccgtttgaggcgaaatccgaggaagcaagaatgttggacctgatatctgaagagatcaaccgtctgatcgacatgcagtatgacgaggagttctcggtcgacgtcaacaggctggagattcccttgactcaactcatgactgtcgtacatcatattactaccgacatcgatagagtacgagacctcctcgaatggaacggctatgaggtggtgaacgacgtggtgatccactcgcggctcgtggtggacaacacttcagtcgccacgcacgacgaagactggccggacaatgagacgttatctgatgtaattcaattctgaaatattctcattttattatgtactcgctgataaacttagtggcgacttggtggtatctaacagtcagttttagtagtctatctggctgtaaggtccatgtaaaatatgtttgaattttatctcaaatagacaaatctacttggtagtttattagtgagattgggccttatggccagtctatactgtgacaaatataacaaactattactaatagtatcataggcccgcatcctatgatgctattagcatgaataaagctattatgctattagcatcaataatgctattatgctattagcactaataatgctattatgctattagcactagtaaaggttatatgcaattagcattaatagcagcggagattaattgtagaattgttgcggagaaagctattactattaccagtgccatgattacataataatgatcaaagtagcacaaataatgtaccgcatcaatactttgtgttttgcccaccgatgatggattttctgatttgcctgtttgaatcagattgcttatggtcattacttacttatacattcttgtagtgtattttaagatcttttagtgaacgaaatgtacagaacattcgttcgattgctttttatttttagatttaagtggaagtcatagtaatatgccaaatatacttaaactacatacatttaaagttgttaagatccatatctagataggtatctattatttggattacaattaagtacctttcatagtgtgtgtatttgtgtaccttttgttttaaattagcgttagtttggtcagagtttgctgagtttccattagttattattagaagtaagtttattttttattggtatgtaatctcttaagtcattggactgatataatgtagcatttattagctaagtaagtgtaccttaatttactttgtttttagttgtatttttggcagcactgatacaaatgtaagcgatcgttggcgagcgcttttttaatgttattagaattattcattgagttttcttacaaaaagataaaaactttcctaaaaggtcttatacacgagtacctagcatgatgccaacggcagagttaaatgccgtcgacggcagtacggcagcaaccatcgacgcgttggcggcagcaatcgaccaatagctatacttgcagttgtagcgtcgatagcttgcagcttgtagcgtcgttgcggttgaaacatcgacgacgatgccgctgacgcgtcgacggtagataccttatcaacatgctgctcatgtgtaacagatttaaaaataacctacttgaactgattttaactatttgtcaattgcttaaaaagttgttattagttaagcattcctgatttatttgaagtaaaacattttaatacgtttatctagtagcttaagtgtcacatgtg

SEQ ID NO: 153 - DNA, 3230 bp, Spodoptera frugiperda
ttttatacataatgttattttaaaaatgattataatttttcaccagattagtttattagttattcgatatttaagacatcgaaatgtctcaaagagcgacaagaacaaaaaagttctacctgtaaataacgaacaggaagattctgagtattctttgaggtttaggcctcctgtttacaaacaaagatatggagaagtgttcaaaactcttatagacagtagatggaggaccaaaattaatacattatgtgattttggttgtgcggagtttggaatcttcacttttttgaaacagttaaatagactaaacaatataatatttgttgatattgatgaagatacattattgttttacaaatctaaagtatatcctttaactatcgaatatttaagtagacgagaggaagccttaaatgtcagtatttttaagggtagtgtaggtgatcctgattatcatctgctaaatgtggatgttgtgactgccatagagctcattgaacatctctacccagataccttagatgcctttgcttataacgtatttagttacatacaaccaaagatagtgatggtgacaacaccaaatgcagattttaatgtactgtttggttgggaggacgagaacaaaacatttagacattatgatcataagtttgaatggacgaggcagcaatttcaggattggtcaaacaacatcatttccctgactatacaatgtattttaccgatataggtgaagggcctgcagggaccgaagccttgggagcttgtagtcaaatggcaactttcgttagaaaagatttgtgcaatgaaagctatattttacaaaaatacacaaaactctgcatctgtgataatgaatctatgtgccaaaagaacactggaactggatctgtgatgagctgtaaatgtgtagcttatgttctccgagtttttcatggggaatttgcacgtattatagtttttcgataccagcgactgatagtgatagttttaaggatccctcatataatgtttattataagctgttagaccaaatcgaatatcctgtcgatcaagatagtcgaactgaggaagagaaaattctcgatgaatttagatatagaataaacattttaggccacatgaatgggagattcttcgttgaagagagagatcgatctgaaataccgataattgaacttttgtatggacctgaaggaacaaatataactgaaattgagctgtgtacgttattaaagagtgacggttatgaagtccaggattgcatagtccaagaaataggtgaatccgaaaaatgtgttatttacacaccaatattgatggataactgttcaacttcttcggaatctttagaaccagaaggcgattttcatacgtatattctacctccaggatcagattctgattgggatgaatctataaaggaggaaaccaacaacaaagatgtaaaggcaaaattaggcgaaacttctggacttaaagaggaaaatcactcagatgtgctaaccaacaatgtggtaccagaagaaagtcaccaacaactgcaagatgtaaaagcaaaagtagccgaaacttctagacttaaagaggaaaatcacttcaatgtagtatccaaaaattcagtacccgtggaaagtccacaacagcaagctgaagaatcccaaaataattgtgaatatcaagaagaaacagacatatttgacgatgcaataagttctactataccatcagacgaagataacaaattgcatttgaaaaaagctttagactttgaaacacactcattttcgagtgtaccaaacaatgtagatgatgaaaaattggataattttacaattaatgaattagataggtttcgtgatcttacgtcaactaaaaatgccaaatgaaaaattggacaattttacaatcaatgaattagacaggtttcgtgatcttacgtcaaccaaaaatgccattggtcgtgtccttaagctccaccaaaggattcgtaagatgtttttcaaagaaatggacccagtcgcaggtccctccgctctaccccccctaaagaagagaaaaatgaagattcctatctcagacagtaagtatgaaccaaccctgatggacgatatgaaatcgttgacgaactgcattataaaaaatactttgaacgtgttaaacgtggatgatgacaggagtattgtatttgctaatgttccaatgaatgggcctgtgtttactggcaatcctggtctgataccagaaattgacgaaagtcaaatgcaatatctggatgtggatggtattactgattctctcattgatgttagaggaaattcaaacatcaatggtattcgtccgagcaaatttatcatagaaaacaacataattaacttcaatcttcagttgcccccaaaaccctcaacaacttcatctcagccaataccgcctttagcatcttcggaaatgtcaatacctgaatttgctgacattcaagaacaaaacatacattcagaagataatgctatcgatcaaaatgattcggatattagttaccagtgtggctgtgacgaatattatgaagatgcagtaagtgaaggaagtatgacagcttcagtcgaccaatcaagcacagaggcagttgcagatccgaattccacaatagatctaacagtattcgacaccgatgttacgattcctgaagaaaatgcgccacatccagaaaactcaatgggtgcgaactacttgagttttgatgatttaatcgttgttgttcctattcttcttgatccgttggaaactcttgatttgggacagaatacgaatggatttcccgcttggctgcttgaaattctaaacactcaagtcagagaagaaaacttaccacctacaaatgatttagaagagcctcatttttattgtcaaggagacggattaggtgttcactcatctctactttcggtagaagtggacgagggagaagaagcatcgtctgaatctagcgacgaatccggagattacgccgaagtagatccaggtatatcgaccatggatatgagttcacttccagaagattcgcaaggacttactactgacaaccaagattctttagaagaagaaactgacaacagaattgctgcgaatagtcttccagcaataccacaaaacgaagttgaagcaatggattccgtatctaccaattcaaatatagaaactgaataaaaattacaataaatgttaaaaaa

SEQ ID NO: 154 - DNA, 638 bp, Spodoptera frugiperda
gcaactttcgttagaaaagatttgtgcaatgaaagctatattttacaaaaatacacaaaactctgcatctgtgataatgaatctatgtgccaaaagaacactggaactggatctgtgatgagctgtaaatgtacctgtagcttatgttctccgagtttttcatggggaatttgcacgtattatagtttttcgataccagcgactgatagtgatagttttaaggatccctcatataatgtttattataagctgttagaccaaatcgaatatcctgtcgatcaagatagtcgaactgaggaagagaaaattctcgatgaatttagatatagaataaacattttaggtcacatgaatggaagattctttgttgaagagagagatcgatctgaaataccgataattgaactgttgtatggacccgaaggaacaaatataactgaaattgagctgtgtacgttattaaagagtgacggttatgaagtccaggattgcatagtccaagaaataggtgaatccgaaaaatgtgttatttacacaccaatattgatggataactgttcaacttcttcggaatctttagaaccagaaggcgattttcatacgtatattctacctccaggatcagattctgattggga

SEQ ID NO: 155 - DNA, 1146 bp, Spodoptera frugiperda
aaacgatagaccatagaccgtattgtttatttttatacaaaagaatctgaaaattgtaaatctacacaaaaatgtcaaatcatgtcaagaccccggcgatggttcttcaagagctggcaataaagaaaggctttcaatcaccacattatgaaattactcatagtgtcacgggaactcataacaatagattcgattatagagtaagagtagccggagtggaagcaactggtactggttgctcaaagcagattagtaaacatgatgctgcatacaatgcattaaagctgctagaagaggacggcatttatgatccaaaagaaattcccatgagggaatttaaggcatctattatacaaaaacagtgtgaattagatgctggtgcagctataccttcatctgttaacttcgtagctcctttaaaagacatttgtgctgaaaagaaacttcaagatccagtgtttaaggaactatcagatgttggtccgccacactgtagagaattcacttatgaatgtggcataggttctgtcaaaactgttgcgactagcacaacaaaaaagatggcgaaacaattagcagcaagagaaatgctggaaaagttaaacgatattctacaggatttattattagagtgtcctcgtgaggaagaggaatttgaacagttaccatctactatcagagatcgaatgtgtgcagaatcagcactgaatcaaaaaattctccatcgttacaataagttattcggacaagttataccgaataaaaaaggaaaactaaaggatttctcaacttgtttccgtgagttgctgaacaaatttgaaaaaaccagagaggatttcgtcgaagatctctgtgagaagacagaagaatctctagtcagaattttagacaaaatggaactacaacatgatgtaattgctgtacaagaaggaattccaataattgtttgtttatgtatcaatactgatgtatcattgactacatcaggtgttggtcaaactttcaaagaggccaaagaagaagcgctcgagactgcattcatgatgcttgacatgtatattgaatagttttcaaataaaaattaaaaaatgtataatacattgtaataattgtatttttgttacaatatatattcttctacaaaaa

SEQ ID NO: 156 - DNA, 1197 bp, Spodoptera frugiperda
acgatagactatagaccgtatccgtattgtttatttttatacaaaagaatctgaaaattgtaaatctacacaaaaatgtcaaatcatgtcaagaccccggcgatggttcttcaagagctggcaataaagaaaggctttcaatcaccacattatgaaattactcatagtgtcacgggaactcataacaatagattcgattatagagtaagagtagccggagtggaagcaactggtactggttgctcaaagcagattagtaaacatgatgctgcatacaatgcattaaagctgctagaagaggacggcatttatgatccaaaagaaattcccatgagggaatttaaggcatctattatacaaaaacaatgtgaattagatgctggtgcagctataccttcatctgttaacttcgtagctcctttaaaagacatttgtgctgaaaagaaaattcaagatccagtgtttaaggaactatcagatgttggtccgccacactgtagagaattcacttatgaatgtggcataggttctgtcaaaactgttgcgactagcacaacaaaaaagatggcgaaacaattagcagcaagagaaatgctggaaaagttaaacgatattctacaggatttattattagagtgtcctcgtgaggaagaggaatttgaacagttaccatctactatcagagatcgaatgtgtgcagaatcagcactgaatcaaaaaattctccatcgttacaataagttattcggacaagttataccgaataaaaaaggaaaactaaaggatttctcaacttgtttccgtgagttgctgaacaaatttgaaaaaaccagagacgattttgtcgaagatctctgtgagaagacagaagaatctctagtcagaattttagacaaaatggaactacaacatgatgtaattgctgtacaagaaggaattccaataattgtttgtttatgtatcaatactgatgtatcattgactacatcaggtgttggtcaaactttcaaagaggccaaagaagaagcgctcgagactgcattcatgatgcttgacatgtatattgaatagttttcaaataaaaattaaaaaatgtataatacattgtaataattgtatttttgttacaatatatattcttctacaataaaaagtttagattttagatgggattagttttaatgttaactcgtccag

SEQ ID NO: 157 - DNA, 1058 bp, Spodoptera frugiperda
aaacgatagaccatagaccgtattgtttatttttatacaaaagaatctgaaaattgtaaatctacacaaaaatgtcaaatcatgtcaagaccccggcgatggttcttcaagagctggcaataaagaaaggctttcaatcaccacattatgaaattactcatagtgtcacgggaactcataacaatagattcgattatagagtaagagtagccggagtggaagcaactggtactggttgctcaaagcagattagtaaacatgatgctgcatacaatgcattaaagctgctagaagaggacggcatttatgatccaaaagaaattcccatgagggaatttaaggcatctattatacaaaaacagtgtgaattagatgctggtgcagctataccttcatctgttaacttcgtagctcctttaaaagacatttgtgctgaaaagaaacttcaagatccagtgtttaaggaactatcagttgttggtccagcacattgtatagaatttacttatgaatgtgccgtaggttctgttaaaactgttgcgactagcacaacaaaaaagatggcaaaacaattagcagcaaatgaaatgatggaaaagttaaaagatattctaccggatttatcattagatgcttataagaaggaagaattacaacagagagatacacctacagaaacaaattattttaaaattctcgaacgttacaataagttattcggaaaagttatatcggataaaaaagtaaaaataaaggattttgcatctgttttcagtaaactgatgaaaaaatttgaaaaaaccagacaggattttgttgaagacctatgtgagaagacagaagaatctctagtcagatttttaaacaagatggaactacagcatgatataattcccatacaagaaaaatctccaattattgtcactttatgtatcaatactgatgtatcatttactgcaatgggtgtaggtccggatttcgaagaggcaaaagaagacgcgctacagcaggcatttataatgttagattgttatattaaagaatagttattgaataaa

SEQ ID NO: 158 - DNA, 1122 bp, Spodoptera frugiperda
aaacgatagaccatagaccgtattgtttatttttatacaaaagaatctgaaaattgtaaatctacacaaaaatgtcaaatcatgtcaagaccccggcgatggttcttcaagagctggcaataaagaaaggctttcaatcaccacattatgaaattactcatagtgtcacgggaactcataacaatagattcgattatagagtaagagtagccggagtggaagcaactggtactggttgctcaaagcagattagtaaacatgatgctgcatacaatgcattaaagctgctagaagaggacggcatttatgatccaaaagaaattcccatgagggaatttaaggcatctattatacaaaaacagtgtgaattagatgctggtgcagctataccttcatctgttaacttcgtagctcctttaaaagacatttgtgctgaaaagaaacttcaagatccagtgtttaaggaactatcagttgttggtccagcacattgtatagaatttacttatgaatgtgccgtaggttctgttaaaactgttgcgactagcacaacaaaaaagatggcaaaacaattagcagcaaatgaaatgatggaaaagttaaaagatattctaccggatttatcattagatgcttataagaaggaagaattacaacagagagatacacctacagaaacaaattattttaaaattctcgaacgttacaataagttattcggaaaagttatatcggataaaaaagtaaaaataaaggattttgcatctgttttcagtaaactgatgaaaaaatttgaaaaaaccagacaggattttgttgaagacctatgtgagaagacagaagaatctctagtcagaattttagacaaaatggaactacaacatgatgtaattgctgtacaagaaggaattccaataattgtttgtttatgtatcaatactgatgtatcattgactacatcaggtgttggtcaaactttcaaagaggccaaagaagaagcgctcgagactgcattcatgatgcttgacatgtatattgaatagttttcaaataaaaattaaaaaatgtataatacattgtaataattgtatttttgttacaatatatattcttctacaaaaa

SEQ ID NO: 159 - DNA, 2009 bp, Spodoptera frugiperda
tctcatctgtcaaataagagagttgtttttaccgcgggtgttttcagaaaatcagcgaaaatgtgtgaaaatcacgtaataaacactttatttacggacttccaaagtaatatggatagagagcaagaaatacgagaggttataagaaatatctgcaaggatgtcggtcaaatatcgcgggaagcgaccacagtgcttcaagttatccaccacaatgaagccggcatcaatcctgcttgtcttaaagccagggaattgtttgagaaggcgcgggaaggatacgccagactgactgaagctttgcctcctaatgattactacaaataccaagaacattggcgcaacatgacacagcgctactgcttcctgatcgcactcaccatctggctggagactgggatcctcgccacacacgagactgtagctgaggtgctcggcattagtgctctggaaaggaagactggtttccatctggatatagaggactacctcaacggactgctgcagctgtgctctgaactgtcccgcctggcggtgaactcagtaactcgcggcgacttcgagaaaccgatgcagatctccaagttcgtcatggagctgaatgcaggcttcaggctactgaatttgaagaacgatcacctgcgcaagcgtttcgatgtactcaagtacgatgtgaagaaaatagaagaagttgtctatgatctcagtattagagggctgcggcccaagccggagcccgtcgtcgagggttaaagcctaactttgtggtaccaattgtctattgccagtagaggtgaccgatttttcagataaatactcaaaatgtacgaatattgagtaaaacacacgtatttaactaactaaaaatcacggttttctcacgtaaatgtatctactagtttcgagtaacagagggactcttcatcatgagcagcgtgcgcagacgcggcgacgtcgcgcagcctactggtcgcacgcacaacgcacggtctaatcggaccagtagagctattcttcattaatatacgtgagtaaaccgcgatttttagttaatttagtaagtctcacgatagataatataaaaatataacgtgttatttatccactttttagataaatattctaataaaaactaataaatactaagtatttactcggtatttatacattttgagtatttatccgtaaaaacgcccatctataaattaccagctaaaatatcttgtttttacaaaagtgtagtacacgctaggatataattaaaaatcttatttttatagtcacttgctaggattttgacgtgtgtcgtgcgattacaaacatacaatttcacatacacatgacacccagactcggaacaacgatttgttgaacaaaaagttggtttatacgggaataaacttgaatatgggtttagaaattgattaagagtcagtgtcgatataaaaaactaatttggtaaagataaaaataagcattttgattaaaattttggattttgatcgtggcgtcattaaaggcgctgtaaccaaggctaatcccgcatctcgggcaaatacagctatgctgttttgtattaaaaatactagcttttgcccacgttaaattaaagttcttcatctaaaaccgcatcaaagtctgttcagccaaacgcgagatgatcgcacacaaacataaatacatacaggtctaactgtgaacctacgctcaacctactttttttaagttggttaaaaagcccttatcaaaatctgttgtgtaattttatagatctaagcatacagacacgcagacagcgaaagcgactgttttgtactacgtagtgaggttacataaatttgtatcaagaccgtaacgtgaaatatttcggtctatatgtaagatttttatagtatttttctataatattaaagttagaaagggataaatagaattggtatataaaaagattggtacctatagcactgatattctaaaagtattctttttaatattaattggttatagca

SEQ ID NO: 160 - DNA, 3010 bp, Spodoptera frugiperda
ccaacgatatcagttgataagcggaaattcgcggactctgggcagtcgacacgaattcctgtaaatgtacacatgttttatattctgcatcaaaacgttaccaattatcacaatgcctatttcacttagtttcttgaatttctacatctatttacctatttcctttcgaaaattttacacgaaccacgaatcgaatacgaattcattcaatgaatgaaatgatgctgtcataaagtcaatgtcacatgtcactgtcagaaactcggagcaatccacctgggactgaaactctcgcacacacacaatgctttttttaccaaaactgtaatttcaatgctttctttttaactaaatcgtaaggcaaacattgtatgcttcgtctaaatataaatcttattttcctctacgtgatcctatctttcttctatgatctgaaatatgaaggcgaatgtgatcaatagacaaataatattgacacctgcttgacagttactgccaaaagggacaatgacagcaaaatataaataaaaatattggaacacggcagcaaatgaccgcacatgttattattttatcgtaattatcagcggtaaaaaggatttacgaaagtaaacaatattcattttctactccactacaaatattaagaatgccaccaccaggaaaacattaccgcggaaatcgcaagggttctaatcagacccacacgctagcctctgtcgcgcgagagacggctacttctctgccggcagacagccctgtgcttgcgatattcaaagatgctgctcgcaagttgaatgaacgccaggacaggcacgagcggctcgtcaaactctcgcgtgacgtcactattgaaagcaaaagaataattttcttattgcattctcctataacaaaagaatcatctgaaaatactcttactgaagccaaggatcgtgtacaaaaactgatcaatggacctattaagagtattggcttggagttggagaacagtccagctcacttacatggcagggctgtcactgccgggttccaggagttcatagaggcaaggactttgctgtctctgatggctgaaaaaagaatcattacttacccagaagtgcaaaaggaattggagtatgatatcacagatgatgacaatcagcggtctctagtaacaatgttacccgagtctgattacatgctaggtcttgctgatctgactggggagctgatgaggaaggctatcaacagtatatccagtggagacagtgaggaatgcttccaagcttgtcaagttgtccggcatttgtatactggatacttgggcataacaggcagtcgtctcttagtccgcaagctgccgacaactcgcgccaacgtcaacaaagttgagatggcagtgtatgctcttaaagtgcgcggcggagagacgccggcaccactactgctacctgccgctcctgcagagtgggagccaccgatcaacttatccgacgatgaaggatactattagactatgctgtacatagcactatacctaatgcgctctaacaaggtgcggctgacagatgccagtatgacgttgacgtctctctttagggatggacattagaaaaatctttttttatcgctatcgatactcgcagcatacatttaattctcttgattttttttattaaatgtgtgtgttatttagttgtgcagtctaactacgtgtatatacttgtcaaaataaatattttatgaccgagccctgaggtgtttcagagttacagttttacagaaccgtgaagaaaacaaggatatattagtttgtatatgttggaatagtaccaccacgcattatcaatggcgccggaaatgtctagaaaaatgcctactacatatttctgctcagataatgtcactgtggtttgggcagagagagccgcgtctacagtggatttacccacataattaaaggttttttaagaatgataattgaacgacgcacgattttcgttttttattctaaaaaaacatcgactacctatccatcgtagccgtacatcccatcactaaacacgactatggatttacgttatacgcataacactttactttatttttcatttcattagattttaattgaatactagaacattccggttggttttaatttaattaactacgcctccgaatgatttaacataatacgaatgtgatacagctaaaatattaaggcataatttttaaatcgcagcaactttcaatagtgatacgaaacgttactgaatctgtcagccgcaccttgttagagcgcattaggtatagtctatagactgaacgaaaagcctgattcagatctatttaagtaaaaaaagtattagaaacttaatgcataattgtcattaacatcccacagtagaaaatgtttaattaaactagtggttccattttaacgtcattcacattctgtatctttaatgttttaaacttttccgaggcaatatgcctggttgtctggcgtctagagtttaattattaggatataagctttaatagacagttcattaatatgcctttggattttcattcccaaacccaaatgaagaaaacaaggaaagtttctttgaaaaaataacaaattttattgaggaaaaataacacttaactaaaaatcttgagagtaatctccactgtctggtacatcactgggaggttgccactcatcggattcatctgttccatacggatccgctgcatctgagtcagagtcgccccaactttgcctatttacagttttccgagtcctctttcctaccactatgagattatcaacaggagagtcttcatcacttaaagatactctcctttgcctccttttcctttgtttacctggttaaaattatatcacttataaaaacagtacatttcttctcataatatattaaacataattaaagttttatttgcataatttttggaagtcatttatatttcaaaactcataatcgtaatcgacgctgtccccatctgaatcttc

SEQ ID NO: 161 - DNA, 3312 bp, Spodoptera frugiperda
tgacgtttaagtgagatgtcaagaaatttcactcccctttcctttcattcaaccaaatatccacgatgacgacccagcaaccgactccagctcctccgaaacgtggaattataaaacagattctttctggggattctgttataattcgagcaccatctggagcacctccacctgaaaaacagattaacttttcaagcattactgcaccaaaattagctagacgagctgcagaatctggagaaacaacaaaggatgaaccatgggcctgggaagcaagggaatttttgagaaagaaactcatcggggaagaggtattctttactagtgaaaaaccaccaaatgctgttcgtgaatatggagttgtttatttgggaaaagactttaatactgcagaaaacattacggaatccttggtatcagagggactagtcactgttagagaagcagtaagacctactccagaaataacccgcctgcttgaacttcaagatgctgccaaatcagctggaaaaggcatatggagtggcgctccgtcatctgatcacgtccgtgatatcaaatggactattgaaaaatccaaagaattggtagatcaactccaattcaagccagtaaaagcagttattgaacacgtacgagatggatccacagtaagagctttcttgttaccagacttttactacgtgactcttatgctctctggaattaggtgtcctggtttcaaattagacgccaatggcaaaagagaccctaacgccaaagttgagttcgccgaagaagctcgttacttcgtggaagtccgtcttcttcaaagagatgtagaaatcgtccttgaagcagtcaataacaataatttcattggaaccgtaattcatccaaaaggaaatattgccgaactcttactcaaggaaggtttaggcaaatgtgttgattggtctatcatgctcatgaagagcaacccagacaaattgagagcagctgagaagcaagctaaagaaggtcgaaggaggttgtggaaagatttcgtaccgacggcacctaaaattaccggaaaagaaaaggaattctccgctacggttagcgaggtcaacaacggagatgcccttgtacttaagatggccaacggtgacagcaaaaagatctttttggccagtattcgtgcccccaaagagcctggccgtgccaacgacgacgagggaaaacccattccaagacctaagggtttccgtcccctctacgatatcccctacatgtttgaagccagagaatatttgagaaagaaactcattggcaaaaaggtgcatgtcgtcgttgattatatccaagaagctagagatggcttcccagaaaaagtttgtgctaccgttaccgtcggaggaaaaaatgtcgcagaagctctagtttccaaaggtcttgcaactgttgttaagtatcgccaggacgatgaccaacgtagttgtcgctatgatgaactcctaactgcagagactaaggctaacaaatctcaagtcggtgttcactccaagaaagatgctcctccactaagagttaccgaaattgatgctgctagagcaaaattggaacttcctgccttacagagagctcaaaggatagatggaatcgtcgaatttgttgccagcggatctagattgagattatacattccaaaatcaaacagcttatgcactttcttgttgggtggtatcaactgcccgagagcaacccgccaagccaccgacacccccggagaaccctacggagacgaagcgctcctcttcactaaagaaagatgcatgcaacgggaagtatccatccaagtcgacactcatgacaaagcaggcaattttattggttggttgtgggtagataatgtgaatatgtctgtggcactcgttaaagaaggttttgcttcggttcatttcacaggagaaaaatcccaatacgcgtctctattgaaaagtgcagaagacagtgcaaaatctgaaaaattaagaatatggaaaaattatgtcgaagaagaaaaggaagaaaaacacgaagaggaaaaagtacctgtcgaacgtcaagtgaactttgaggaagtcgtagtgacagaggtgacgcccgaaggtagtttctacattcaaaagatttcagaaggaccaaaagctgaagctctgttcgccaaactgcgacaagaattccaagccaacccgcctcttcccggtgcttttacaccgaaacgtggtgatatctgtgctgccaaattcacagtcgacgatgagtggtacagggtgaaggttgaaaaagtacaaggaggaaaagcttctgttcattacatcgactacggtaacaaagaaactcttccaaccacccgcctagccagtttacccgccgcctacgtaagtgagagacccttcgcaacagaatacgtccttcccttcatcgtcctgcccaaagacgaagaattctcttcgttggctatcaaataccttaaagaagataccgccgttagcaagctatacatgaatgtagaatacagacaacccggatcccctgcagcagcttctttacattctgacaagacgtctgatgccgacattgtaaaaaatctcgtcaaagagggattacttatcgtcgacaacatcaaaggaaggcgtaacaataaattgttggaaagttaccgagaagctcaggaaacggccaagaaacaacacgctaatatttgggaatatggtgacatcacagaagtcgatgctaaggaatttggacttggcgtttaaactagggaatagggaccagtctaccagagcaaaccatctacattgtaggttcatagacttccaaatcatattgattaaaatgaaacaacttccacatttatagtaatagacataatatttataattgatttccgatatttatacatgagaaatatgtttttaggtgttatttgttgttttatatttttattatgtgcaaattttaattattatatttatatactgggtctctttattctaagtcatttttttgtaattttttccgacacgattgtttttatgatatatttattttgaattcaatttatctatttacatatttctgttgaatattaatttttgtgatgaattctaaaggtgttcacacacttccactctgtaaaagacatgaaataatattaaactagactgatacgccagtaaaggaaatatttagtcctctgaattgttatatatttatgtacgtactgcaattattcatatttcgggaaagcgataatgtaggggatgggctctgtttacaaataaattactttgatcgttaaaaaaa

SEQ ID NO: 162 - DNA, 3976 bp, Spodoptera frugiperda
aaaacaacattttaatggccatagactactgttaactcattaccaaacggccgccattttgtacattagtcgattattgatccgaaaacaggtataactaattagtattgtcagacgagaatatcagtcttacggccgcggagaaagtatcaacatcaataaaatttaccctcccttctcaatgtggaaacactagcagcggccacgtttcgacaatcttgttagttcttcgcacatcagtcattttataacatcttattcttttgccggattttcaaaaagaaaatactttaaaaatgagtgctccagcacccgcgcctgcttataaaataggaatcgtgaagcaggtactatcaggggatacgattgtgatcaggcgacaaccgcagggcgggccgcctccagagaaagtcatcgcgttgtctggcatcaccgcgcctaagttagcacgccagaaaacaccaaataatgatacggagacaaaggacgagccctttgcgtgggaggctcgtgagtatctcaggaaactagttggccgtgaggtcatctttactgctgataagcctcctaattccgctaccagggaatatggatgtgtgtggacaggcaaagatcctatcaaggatgataacgtaatagaagtcctccttactgaaggcttggctaaagttagagatggaggtagaaatatacctcagttgaagaggcttgttgagcttgaagacgttgcaaagtctcaaggtaaaggcatctggggtcctgatttacaggaccatgttcgcgaaatcaagacgtggacagacagtccaaaagctctggtcgctaaatacaatggaaaaccaattaaggccatcattgaatatgtccgtgatgggtccacagtaaggctctgcctactgcctgatttctaccagatcacactgatgctgtcgggaattcgatgccccgcagtgaggcaagatggtgaatccgagccctacgcagaagaagcgcgtttctttttagagtctaaacttcttcagcgcgatgtagaagttgttctcgaatctgttaataacaacaattatgtgggtaccatcttacacccacaaggaaacattgctgaagctctcttgcgacagggctttgccagatgtgttgactggtctcttgcagtgatgaaatcaggagcatcatctttgcgaagtgcagagaaagctgcgaaggaagctagaatccgaatttggactaactatgtgagcaatgctcctattatagcagccaaggacaaggagttcacagcgacagtaatggaagttgtgaatggagacgctcttgttgtgaaaatgcccaacaacacccaaaagaaaatattccttgccagcatcagaccaccacgtgaaaaaaacaaccctgatgaggaaggcaaaaactctccaagaccaaaaggtttcaaacccttgtatgacataccatggatgtatgaagctcgcgaatttctgcgtaagaaggtgattggcaagcgagttaacgtaactgttgactatatccaacccgcaaaagataatttccctgagaaaagttgctgcactgtcgttgccggaggagtgaatttggctgaggcattagttgcaaagggttatgcaaccgttgttcggtaccgaaatgataatgatcaacgcagctcccactatgacaaactcttagaagctgagctaaaggcgcagaaagctggtattggtgttcacgctaaaaaagacatccctactcatcgtatccaagatacgagtggagactctgccaaatccaaaaagtttttcccattccttaagagagctcagaaaacagaggctactgtagagtttgtcgccagtggatctcgaatgaggatatacattcccaaagaatctgtcctggtgacattcttgctagccggcattaactgccccaggggatcacgtcctgccataggaggaggtggcatgcaaagtgccgaacccttcggtgaagaagctttgcaattcaccaaagagaaatgcctccaacgtgacgttgtagtcaccattgaagaaatggacaaggcaggcaacttcattggttggctatggaatgataacgagaacttgtcagtggctttagtggagcatggactagccacaatgcaccacaccgcggaaacttcagagtttgctcgccaaattaaaactgctgaagagaacgctatgaaaaggcgaattggattatggcgggattatgtagaagttgaaaaagaaactgaaaaggaaagaaatgctccaattcaagatcgtactgttaagtatgaaaaagttgttattactgaggtaacagaagaaggcaatttttatgcacaaaacgttgacttgggcagtaagctcgagaatttaatggatagaattcaccaggaattcaaaaacaatgcccctcttcctggatcatatgtccccaggagaggacaaatctgtgctgctcgttacacttcagatgaaaattggtatagggccaaggttgaaaggatcacagaggacaaaatggttcatatcttctacatcgattacggaaaccgtgagatcgtgcccgctgcgcgcctggctccactgcctccaggcactgatttggagcctgcttatgccagcgagttcacactgtgttgcgtcaagttcccagtggaccctgaagatcgatctgaagcagttgctgttttctcttcagacacgctgaacaggaaactgcttcttaacgtggagactcgtggctctccaccttgcgtcactcttgtcgatcctaacaccaacgttgacatcggaaagaatttgatcaaagagggattggtactgctggaaccactgcgcgaccaccgcctgatgggactggtagctgagtaccgcgccgcgcaggagcacgccaagtgctcgcgtctcaacttgtggcgacatggagacatcactgacgatgatgccgtcgagtttggtgcgcgtcgctagcgggaagttaccgactcgccacagcacgtgctaaactgtgttatgtgcacagctttacacatccagtatatcttatatagcatcatacaaccgtttctgtgagcgcgttcaatattaaccgatttctaatacgtaattctgtctttctggttgtcgtcttccttatgtccttatttccttaggaaatcaaaaccaatacttttagaaatcgtgatgatcatattgtgattaacacaatatttgaataaattgtatactttgtgtaatgagatgtgtcatgtgtgtatgtggggagtataatgaacattattatgaacactattccgtaacattatgatactcgtggcattatatgcctctaaatttgtatctgcatatatgtacttttaatgaaataataattattatcaggattaagcaacatttaataaatgtactaatgtaattgtataattattataacaacataaaaatacctttcattatggtgaatgcaaattgttgattttatttacattttttacagttttgtatatcagaaatacattatatttcgttgttaatttcattatttatttttacacgaagaatattattcattaataatctgctcctgtgctttttatcattgttattttccgtatctcttctttacaattctattttacaattaatgtgtatttttgacttgtaaaagcatttgagcatgtatgtgtatctggcattcgtcaaagtgtagctagtgaggagtttaataagaattatgaatgttcgaaaacagatttattacgtatctttatttaatgggtaatattgtacgagtggtatttcgaaaaacttttagcttcgtatttcgtgcttataagaatacatattgtatgaacctacctctcacctcgagatgtcattgtttttagaactttacatgcattcatattcataacaatacatggaatgttaaacttcgtatattaaataaatattttaggaattta

SEQ ID NO: 163 - DNA, 3633 bp, Spodoptera frugiperda
agaatttaaaaagaaaactgttccgccattttcattcttttctctattccttttcgtcatatggcgtattaggtgcgttcgcttacatccgccatattaaatgaaattaataaaataagacaaaatgtcgccttactaaagtgcgtgaaaataatccaccaacatccagttattgtgtgattaaatcatcaagaggatcacaatggagaattcctacggtgtgggggttgtgaacagatacgctcttttcttggacgatgagtccgatcctcttgatgcgttaaaagcgcgagagcaggcgaaggagctcaaaaagaaaaccaaagaagccgagaaagagaacaagggcaaacctgagaccaaacctaaaggtggcgctcccgctaccaggaaaggtatcaaggaaacccaaaatgtaaagtctcaagaaaacaggagcggtgagcaacagaaggccaagggtcctgccaggcctaatgaacgcaacacggagcgtcctcctccgcgtcgccgcgaggatcggccgcagaacggtgccgtcgagaacaaggatggagctccacgaccacctcggcgtgagtttggtgatcgtaggcccaactatgagcgacgtaatttcagcgagaatcctgatggagccgaacgccgcgggcctagaccgcctcgtgaacctcgtgaagctcgtgacggaccgcgcgggccgcgtccgtacgacaatagaggaaagcgtgagtttgacaggagatccggctctgacaagaccggtgtaaagccagtagacaagcgcgagggcgccggccctcacaactggggtactctcaaggacgacattgacgaactcaacaaaaccggttctgaaggagaggttgttgaggagaaggcggccgacgcagctggcgctggtgacggacagcagccagaggccgagcgcgctgctgctcctacagaggaggagccccgcgaactcacacttgacgagtacaaggcactccgaaatgcccaacgcacgcagccgcaatacaacctgcggaaggccggggagggtgaagacctcagccagtggaagaacttggtgatgctcgagaagaagaaagaaggtgaaagaggtgaggatgatgatagcgatgacgagtacgatatggccgattatccgcagcgcgtgggtcgtcagaagcgtgtgctcggcatcgagttcacgttcaacgacacagcgcgacgcggcggcacgggaggccgtggtcgtgggcgcgggcgcggtagaggccgaggcccgccacgcgagcccgagccgatggaggagcgcccgccaatgcgcgcgcaggtcgcaccaccaaaagttgatgacagcaaggattttccctctcttggctagactcacagtgagccttcgttcttctccctttcgatagagttacaaattaacatattgtatgtaccgttatttttgaagtaaatatacaaaatatttacacaagcgtgtattatattacattataaaatgtagttgatttcttcggaaaccacctttcaatttactattgacaatcgggttacattgataaaggttatagggagttgactagtcttgctcgccaatcacataggatgttgtagagggggaggattatttttaagagtttttaattttggattcacatagctacaatatgcatacggaactataataacagtagcttttacgatattgtaatcacatcagcttatgatttaactgagttttatggaataaggattttaatcttactgactgtgacaagctatgaactaactccgtcacaatttagagtagatcatgcaaagtaacccttgttgcatttttatgtgagtttgtgttgacaaaatgcagactttgggaactgtaaatagttgatatatgttaaaagataaggtcttaaaaataacaaggttgatttttgttgttacacaacttcagaaaaaataaacattttgtatgtgtgatattttttcttaatttcttcctattttctctactcctcccccagcctttagctagtgatatcctaatttgaataatttgtgcagaatttgtgcttggtgtgactgatcaggggtaaataaaagcattagaactgaagtaatgttgtatattgacacattttatcactttcacacaaaaacaatttacttaaaatttaaggtaataaaaacaatacacattttgagttaaatattcaatataatagaattattacttacaaaaataaacatcagttacacatatgtgtttgttgataagcacaataaataagatatttacattctgagacaaaatactgtcctatatctgaatgttaagacgagcaacaactatttattatgaaccacagcattaccatttataactatacaactgatcaaattacaattaatataacaaaggaacataaattgtttacagaattctggctaatttgttcaatcatgatttatttaaaagtttataatatagggataatgtagtttgagttcacacagcagtgattgacaaaatatacaagtgtttggatattttaattccaactaaattattgataatgtagctgactagtgtttgcttgcaattgaagacaaagaacttaattattaaatacttctgaattacacatgttaaatacttctgaatcatcatgtttcttagcagttaagttgcaaatatgaaatgatttttttaattcaactatttatttacgcaataatattccgtgttcacaataatttaaaattaatgttcttatcaaaggtgatataggttacaattataacataaattagtgacgtaaaagcgtaattactaaacacaggacttaagtcccgtttcacagccacaatatacgttcacttataacaaaagcgataataaagtacaaacctcgtaggtcacgtggcccgttacaataataataaatacctaggcacgtcaacacatattttctttattaaactgctaaaatatttctatctttgtttgcctgttatactataaattgactattatttacattgacaacaatacttgtaattagtcacaattatttacagcttctaataaatacggtttcttacatacttcatacagtactctcaatctcaatcagtggttgaataaacttcttgacagtcatttccgatgttaataaatgtgttaatttcaagagtagttacagttcacattctcagttatgattactagtcttaaatatttattacaacttcactatgcgggaaaaaaacgtggttatgtagtattttatcacgaatatcgtatcgtacgtagataaggttttttaccacaataacgaccatggtgcggccgtaacgtacgtaactcgtggtcgagttccagtattcagaataatatgaagcattcgctacttgagctttatttaagtaatgttcaccgtactacatcgtcacagatgtacagtacgaaaagcgtattcattcagagttcacggcagtgaaagcttcactcgatgccgaaggtgttggtttcctcgacagccagcagcagcttctcgtgcagcaggtgcggcgtggggtagggcggcaggtcgaggcggttgaagcacgtgtgggcgcggggcagcgact

SEQ ID NO: 164 - DNA, 2751 bp, Spodoptera frugiperda
atgccgaaaaaacggctcaaaaaccgagctggtaagaccagcaagaatgcaagtcaatcttcacgcaaatccggagatcctcctacatgcccacagtccccacaaaccccaacatccccatcagcctggagccctcgcacttcccaatctcgcaaatcaaccacaagtaaagcacaaccagtctcctcttccccaacatccccgtcgataccgtcatctcaaacaaccttgacatctacattaccccacggcactcccacttcacaagaaggcaggagatcttcgaaacaatctagattgcaagaacaatcggaggatgtaccaaaacaactacaaagaatgagtatagacaaaccaacatcacgatcaaatatttcaagtaaaccgggcccctcatcatctgggcgtggacacggggcgcgccctaacaccgaacaaaggcccgcactacgaacaaaacccagtactatatcatcaaaaaaaggctctactggcaacgcagttaatttgatagcaaattactttgccgttgaaactacaccccattttcgaatgtaccagtaccacgtcgacttctccccggatgaggagaacacttttgtccgtaagagtctcatgcgcatccaccagaaagttttaggctggcacgtctttgatggatcagtgatatatagcatgaaacgattgcaccccgatcctaccgagttttactcggaccggaaatctgacaaacaaaaaatggttattacagtgaagctgataggtgatgtcgcccccggtgactatcactatattcaaatttttaacattatcttgcgaaagtgtttcctcgcaatggacctgcaattaatgggccgcgactattttgacccaacagcaaagatcgatattcctgaatttcggcttcaaatttggcctggatataaaacgacaattaaccaatatgaagacaagttattgatggtcgctgttataatacacaaagtacttcggttggacaccgttctccagatgctaaaaacatatacaaacactaaaggaggcaactataaaaaatgttttctcgaagacatagtcggaaaaattgtgatgaccaactacaaccggaggacataccgggttgatgatgtgtcatggctgactacacctaaatccacgttcaacttgagaaatgtgaaaatttcttacatagaatactataagaaaaaatataatattaacatccgcgacgtcgaccagcctttactaatatccagatcaaagccacgtgacatccgcgctgggatgcctgaactgatctatctagtccccgaactgtgccgccaaaccggattgacggaggagatgagaaacaacttcaaactcacgaaagctcttgatgcacatactaaaattggccccgacatccgtgttaacaaattactacaatttaacagaaacttaacgcaaaatccagaagttataaaggaactaaatacctgccaccttaccttttctaaacaactgatgaggattaaaggacgccaattgccaactgaaaatatagttcaaggtaatgaatgccgttatccagcaggtgatacgccagaaggatggacgcgggaagtacgatcaaagcccctgctgcgtataagtcaacttccatcttgggtagtgataactccagatagggcacggagagatactgaagcgtttctagacatggttataaaggcagctagagatgtaagattcatgctacccaaaccggaaattgtgactatgcaatacgacggccctatagattatgctcgaatgctggatgccgttatagcccgtaggaatcctgcgatgattttatgcgtggtcacgcgcaagttatcagatcggtacgaagctattaaaaagaagtgtctagttgaccgtgccatccctactcaagttgtaactttgcggaacatgacgtccaactccgctatgtcagttgccactaaggtggctctccaaatgaactgcaagctcggtggcgcgccgtggagagtagagatccccctacaaaacattctagtagtgggctatgacgtatgccacgacactcggagcaaacaaaagagttttggtggatacgttgcttcattggatagacatatgacgcgctactactccgccgtcaactcgcacacgtctggcgaagaattaagcaatcacatgggcttcaatacagcctcagccctgaagaaatatagagaagtgaacggtgtgttgccgcatagaatttttatttatcgcgacggcgtcggtgatggacaaattccttatgtacacacacacgaggtggccgaaataaacaaggcacttcgtcaattgtatggccccgatgaatttaaaatggcatttacaatagtttcaaaacggataaatacacgttttttcctggaacagggtagcagatgtgtaaacccgcgacccgggactgttgttgacgacgtagtaacgttacccgagcggtatgacttctttttaatttcgcaaaatgtgcgagatggaacaattactcctacatcgtataacgtaatttcggattcaactggactgcatcctgacaggatgcaatggttgacgtacaagttgacccacatgtacttcaactgctccgcacaagtccgcgtcccagccgtgtgccagtacgcgcataagttggcgttcttggcagcaaatagtctgcacagccagcctcataatagtttaacagacaccttgtatttcttgtaa

SEQ ID NO: 165 - DNA, 3885 bp, Spodoptera frugiperda
gaatgttgtttgtcttgtttgaatcttcattttagtttctattctatggctgctgttattctttcttcgcagttttgtttttaacatttgcaaatttttatattagcttgtattgttatttacaatcacaacaatacatataattaccttggcatgtcccagcctggaggaagaggatgggggcgtggtcgggccggcagaggcggtgacaatgccggtcctcctccgcgcagacctggcgagccggcaagacctgtccccacccaacaaccagtccctacgggtcctcgcccacagccccctacgccatggggccctcctacagcgcaagctggcagagcctcgcacagatctactccatctactcatcaagagcatcccggtgatgtagatgtgcagcagagaatgcaagcgatgcagattgctggaacatcgcaaccaactgctgctggagaaccaggctccgcggtaatcgggcgtggctcgcgacgtggtggcggcagggtgctgccagagcaaatgacgattttgcgtacacgccccagtaccatcgattctaagaagggtacttctggcaccgtcattgaccttagaagcaattattttatggtcaaaactactccacaatggcgtctctaccagtatcatgttgatttctcaccggacgaggacagtactttcatccgtagagcacttatgcgtgtccatgctaaaactctgggcggttatttgtttgatggttcggtgctgtacacagtcaaaaggctacatcctgatcccctagagctatactctgatagaaagactgatgaccaaaggatgagaatattgataaagctcacatgtgatgtcgcccctggagactaccattacattcagatattcaatatcataatcagaaaatgctttcaaatattggatctacaattgatgggcagagattatttcgactctgaggctaaggttgacattcctgaatatagacttcagatctggcctggatataaaactaccattaaccagtatgaagatcgattgttaatggttactgaaattactcacaaagttcttcggctagatactgtactgcaaatgttaagtgactatgctgcaagtaaaggcggaaattacaaaaagatatttttagaagatattgtggggaaaattgtaatgacaacttacaacaagaagacatacagagtggatgatgtgtcgtggcaagtgtcgccaaagtctacattcaaaatgagagatgagaccatcacttacgttgattattacagaaagaaatacaagatcaatattcaggatactgcccagccattgttaatctcgcgatccaagccacgtgatattcgtgctggaatgcctgaattagtatatttggtaccagagctatgtcgacagacgggactcacggacgaaatgaggtccaatttcaaactgatgaaggctttggatgcccacactaagatcggaccagatgttcgcatacaaaagctgatggcattcaatcaaagattgacaagaaaccctgaagtggttaaggaaatgggtgaatgggaccttacattatcaaacgaactgatcaagatcaaaggtcgtcaactgccgccagaaaatattgtgcaaggcaataacaatcgctacccagctggacacaccactgacgggtggacccaggatatgcgatcgaaacctctgttggagattgctcagctgtcgtcgtgggtagttataactccagagaggcagcgccgtgaaactgaaggctttgtagacttgattatgaagacagctggaggtgtaggtttccgtatgcctcgaccagaagtagtaactatccggaatgatagttctatggaatacgcaaacgcctgcgagaactccatcgcgcggaaaaatcctgcaatgctcctggttgttctaggtcgtaaagttactgatcgctatgaggcgattaagaagaagtgcacagtggaccgtgcgatcccaacgcaggttgtgtgcgcccgaaatatgacatccaaatcggctatgtctattgccaccaaagtagctatccagattaattgcaagcttggtggtgctccatggagagtggacatacctcttcaaaacatactcgttataggttacgatgtatgccacgacactcggtccaaggagaagagttttggcggatttgttgcttcattggatcgctacttgacgcgttacttttcagctgtcaactctcatacttctggagaagaattgagctcgcacatgagtttcaatgttggctcagccctcaagaagtttagagaagttaatggaacattgccaagcagggttttcatatatcgtgatggcgttggtgatggacaaatcccttatgttcactctcatgaggtgggagagataaagaagaagttggctgaaatttacgccggtgaagaatataaaatggcgtttataatcgtatcgaagcgcatcaatacgcgcatcttcttggatcgtggacgtggcgagaacccacgccccggtactgtcgtggacgacgtagtcacccaacctgagcgctacgatttttatttggtatcgcaaaacgtacgcgaaggcactatttcgcccacttcatacaatgtaatcgaagattccacaggaatgcatccagaccggatgcaatggttgacgtataaaatgacccacttgtactacaattgttcctcgcaagtacgcgtccccgccgtgtgccagtacgcacacaagctcgctttcttggcggccaacagcctccacagccagccgcattattccctaactgacaccttatatttcctgtaaatgaaaagataggtaaatacctatcttttcatttatcatcctttaaaagtaggcatttgcctacttttaaatatttactttttcattattttctacattctgtgatttgtgaaaatctcaaaacttttgaatattttcatataatgagtatcgagtatggtgtgatactacattttgtattagctctaagaaaatacgtgactgtttagattataaggacttggctgggtttgatattgaatatcagaccttcaacctcttgtttgcggtttattatatgagatgagatggttatatacattatctcgctctgatctgcattccggcagaccaagacttataaaatactcttaagtacaaattcctcaaatttgatactttgaactttgtgtactaaaattgtcaagtaagccgggtgtgataaacatacctcctttatttttttattagtagtttgtaaggttttttgtattaacattaatacttaatgtttttgacgtgactatgactacctccaagaaatgactgtgttgacaacagctagtcatatttaccaccgattgcgacatgtttgattttgatgaatgtttacaatagtgattgaagatgattgtggttcccacattatcaaccagtgatgttaattacataatgttcacctaccaaactgttcctaagaactaattaaacatgttattttgtgttaagcatttttataaaataaaggcctatattgtatagcctaaaaacgctgaacgtttagaaattgccgtaggcatttctcattttttggtaaaatgttgccatatgattgccatgggcatataaatttattttgtaagtttagattaagtgttaccttttttatttcaaaagtttatatcatattagtcatgacattccaaatgagtattatcgtaattttgttagtcttttcttgctttgtctttttttaagagtttcatacagactactcaaacgagaaacgggggtgaggttatcctcacccccgtttctcgtgagggtaggcagagactatgactatcaaaattagtt

SEQ ID NO: 166 - DNA, 3277 bp, Spodoptera frugiperda
ttttgatgatgttggaaatataatttttttggtggggtggttattttaacttacagttggaaacattgactgaatgagtgggagtgaacgaatgaaattaaagcgagatgctaaataatcagtgaagaacaaaaactacgaatgaaaagtgatttcggagagaaaaattgaagccttttcatgtgattttgtgaatttgtgtttgtgcaaaattcattgtagactgtgtttgtataatatttttggagcaacgttcccaaaaaaacgtaccgcttggtagtaatatgagtaatgttaccaaccaaaatggaacaggtctagagcagcagcttgctggtctggacttgcagcctcaggctaataaaagtgctggccgctacatccccccgcatctgcgtaggcagttgcaggccaatccttcacaaggggaagagtctaagcggccaagcttagacgcccgttcaaacgaacaacgggacggccgttcatcattcggaggcaactctagaacctacgaccgtggtggtcggcgcgacgaccgcgaacgtgaccgcgaccgtgactacgatcgcggcaacgactcgcgatacccgcgcagagaccgcggtcgtgattcaggctatcaaaatggcgattcagagccacaacgctggtcggagtcgtccgagagatggggctcatcgggcggcggcggcggcggcggcggcgggcgcagctcgggcgggggagcgggcgcgtcgagccgcgagtcgcgcgacgtgcgccgcgacgaggacttcaacgagccgccgcaaccgcgcaacgaccgctggaaggagcccgagccacgcgctgacgaccgcaacaactcgcgctggccctctgatgatgtacgccgcacgagcaatcgcagggacgagaacgattggacgatcccgctacctcgcgacgagcggcaggagttggagctgtttggcactggaaacacaggcatcaacttctcgaaatacgaggacataccagttgaggccagcggagatcgtgtcccagacttcatcaccagttttgaggatgttaacctgacggaaataatgcgtcagaatatagcctccgctcgttacgacaagccgacaccagtccaaaagtatgctatcccaatcgtgctggctaggagagatgtcatggcgtgcgcacagactggttcaggaaaaacggccgcattccttgtgcccatcctcaatcagatgtatgaagctggccccgtcaaacatatgggaccttgtatccggcgcaagcagtacccgctgggcctggtgttggctccgacgcgcgagctcgctacacagatttttgatgaggctagaaaatttgcctaccgttcccgtgtgcgaccttgtgtcgtgtatggcggttccccaatccacgagcagttccgcgagctggagcgcggctgccacctgctggtggcgacgccggggcggctggtggacatgttggtgcgcggccgcgtggcgctggaccactgccgacatctcgtgctggacgaggctgaccgtatgctggacatgggtttcgagcctcagattcgcaagattgtcgagagccacacgatgccaaagactggcgagcgccagacgctcatgttctcggcgactttcccaaaacagatccaagtgctagcgcaggatttcttatataattatgtttttcttgctgttggacgcgtcggttccacatctgaaaatatcacccagaaggtggtatgggtggaggaaatggataagcgttctttcctattggatttgctgaatgcttccaacttactgcaacgtgcacgcccagaagaggatcagctgatccttgtatttgttgaaactaagaaaggtgccgaccaactggaagtgttcttggataaccttggttacccagtcacgtccatccacggtgaccgatcccagcgcgagcgtgaagaagctttgcgtcggttccgttccggacagacaccgattcttgtcgctaccgctgtcgcggccagaggtttggacataccgcacgtgcgtcacgtgattaactttgatttgccgtctgacgttgaggagtacgtgcaccgcatcggtcgtaccggccgtatgggtaacctgggcgtggccacgtccttcttcaacgacactaaccgtggcctcgcgcgggacctcgttgagctcctcgttgaggccaagcaggatgtgcctaattggctcacgagcacggcagctgatgggcgtcttggcggcggcggacgtcggactggcagcaggtctggcggaggacgcttcgcaagcagcggcagtggctttggcgcaagagatttccgtactcaatcgcgtcagactccacgatcggcaggaccgtctactattggttctgggttcggatacgggggcgggtcgtacggcggtaactacggcgggtcgtacggcggcggcggcggcggcggcagcagcggcggccccgactggtgggactcgtaaagcgtccgctcgcacacccgcagacctcgcaccgcacgcgaccccgtactcgaccccttcattcgtaacttaagcgatgtgaaacgttctagattaatatattttattttaattcgtaaactgatagttggactgaaattgacctgtgactatttaatacggtaatgtttgtacaatagaagagagcggtgcgacagagagatgtgtttgggcgcggccggctgcgggcgctgaatctcaggtgcgctgcccggtggtccggccgggccttgtttcttaacttcatactatcaccatgggcatgcttaacaaatgtctgtgaatatattccgcgagaatggtagttcgcgatcattaatgaagtaatcgattagattaaatttgatcacatgtatcgtttgcgtcacgcgcgacgtgactcgcacgcgttttgtcttttttagtaacgattatgtgaaagtagtttattaatatagaaatatttttgatgtccgatctgtatcgtgaattcgtaagtgaacaatgtaattgtgtattttcgattttctattttcctgaaggtctcatagctgaactcactcatgacactggaattttgaagcatttacgcactctaaaatcgatgtagctaatggagcagtagatttagaaattgaaaagtaccgatacagtatcatagcaaataattactaaattttatcagtagagatcccatattgtaatatctgtcttcgacgtgatctattatttgaatgtgaatttaccaataaaaattaagaaacagaatc

SEQ ID NO: 167 - DNA, 2019 bp, Spodoptera frugiperda
tttagttataatctaacctataatttgtaccggtctaaaaacgttgatattttttgtttagtttttattaaagtactctagttctaatatataacgttttcctttaattcttactagttttaaaaaagagaatggctgaagaagtattaaatggagatgataaaaagaaaaggatgtctgttgggctctacacgagctgtcccccaagtataaaacaaggtgtcgactctgcttttgaacagggataccactttgtagtcacacaacttacacatccaagttataccagaaacttgaataacaatagtcctagtgtcataggaagaacagacagagtaatgaggagttctgattggggcagattagtggttggacaattaacccctactattgacttagacagtgaggtagaacatattcgagaacatagcaaaatgatattcgaagaagaattggggttcgcatctcacctaggtgttccagcaatctggttgacccttaccaaaccagataatgtacaattagctcgtgttttacactcaaaattagtttcaggatttaactatagtgtatgggtaaacattccaatgacccacccttccaggtacagtcccgttgcagaaacggaatatgatacttgggattggtggaataaattccgtacttactgtaattatgataaaagactaggtttagttcttgatttaagtgatactaagcacttactgccggaaaatgagctgaaaagatggatcggggagcctatcagagcaattgtgatacctacatcacactttttaacaaatcaacatggaaaacctgtcctctcgaaagttcatcaagaaattattaaaaaattcatgagtctggacgttcagtatgtaattaaaaatgatactgatagtgacttatctctttacaatagatatataagcttcttgggcaaaaagctttacgtatatgatacagtgaccgattttgttgatggatttgaagattttctccagaaccctctgcagccacttaccgaacacttagaaacaactatttatgaaatcttcgaaaaagataatattaaatatacatcttacgaaaacgctgtttataaagctattgaaatttttccaaaagatgagacaccagttgtaatggtagtcggagcaggaaggggtcctttggtccaagctgttattaatgtatcgctagctttagatagaaaaattaaggtctacgcagttgaaaaaaatccttttgcagttaatacattagtgcatcgtaataaggatgaatgggataatgacgttactattgtcaatagtgatatgaggacatacaaaccgccggaactagctgatatattagtatctgaattattgggttcttttggagacaacgagttatcccctgaatgtctagatggagctcaaaggttcctaaagaagtcaggtatatctatacctcagtcttatacttcttatatagcaccactacagagtactaaaatttataatgagatacgaacaaatcgtcaagtggataaaactctacagttctgttatgaaacaccttacgtcacacatttggctaacttttatgaaattgcatcacctcaagctcttttcacgtttaagcatcctaattggagtgaacatataaataatcagaggtacaagaaactgaaatttcaagcggaactgtcatgtcttttgactggattcgtaggatattttgatacagttctttataaagatgtgatgctgagcatacatccagagacacacacgccaagtatggttagttggtttccaattgtatttccattagagaatcctgtttatgtggaagaaggacagagtattgaagtggctttttggagggcagaatctagtgataaagtgtggtatgagtggtgcttgataagtccagttaacagtggaattatcaatccaaacgggagatctttttttatgaggaagcattgatactgcaacttttaaaaaattaaaaatgtataaacat

SEQ ID NO: 168 - DNA, 2217 bp, Spodoptera frugiperda
cactgtcttgagtgtcctgtgtcagctgtcaaatttaaagaagcggctttcatctgggctgccgcatactactttagtggttagatttattttaattttaggtgaatagtaaaatttccacaagtagaatagtcgtgacagtaacaaaacaaattcacaatgtctcaacacgatctttcttgtggcttggaattcacgtgtactccagatatacaagcatgtttatcagagggtttgcgcagtaattactcgtttatagtatcaccagtagttcatccacgttttcggagaccatgcgcaggtcctggaaaggttggtggctttacgagatcagatatgatcctgtcccctaatgactggactacaaggatggtgggaaggttgtccccttacctgaacctcgactccccgtccgcgatcgtccggcagcgtcatgaagacatcatgaatgaagaattaaattattgtaaaggtcttggtctccctgctattatgttgtctgtgcatggtagagaatccaataacttgactaggattatcaatacatattttgattcaagttatcatccttctataatatgggccagagtaccaatgctgtgtacaaaaacactgaaagaatgtggtgatggggatgaagctgccccattcaatgagccttggctgtggtggtcaaagttccatgaacgcttggagtatgacaagcgtgtggctgtagccctggaactttcagctgacttgccacctgaagatgtgataaagagatggttgggcgagccggtgaaggtggttatcgtgcccacatctcttttctataacaataagaaaggatttccagtaatatcacgggctcatcagcaattggtaataagtttaattgaacatgaggctcagatcctggtatcaggagcgaggaggtcgagtgtggagcactacctccagtttttgtacaggatctggaagagacgaccttacataggtgatgatcctatgttaagttacgctagagggtgggaagattacttacagactccactacaaccgttagcagataatttggatacacatacttataatgtttttgaaaaggatccaataaaatatgaccaataccaaaaagctatagcacaagctttgactgatttgcaaaagggaccatctaatgtgattaacactgacattagtacaaatgcacaagaagcaggacaaggtgataatatggatagtaaaaagaaaacatataccgttatggtgctgggagctgggaggggaccattagtgagggccacacttaatgccgctgatattacaaatagtaaagttaaggttgttgctgtggaaaagaatccttgtgctgtggtagtgttagcagcccaagtacgtgaagtatggcgcgacagagacgtggtggttatacccggtgacatgagacagatcaatctatcaccaaaggctgacattattgtttcagagttattaggatcatggggtgataatgaattgtctccagaatgtttggatggggctgctggtctcttaaagccaggaggtatatcaataccttgtcaatacagatcctatgtggctcccatttcatcacctcggttatgggcagcagctaaagtagcttcttctgttgctcagtcgagccataaagataaaaacttggagactctatgggtggtttacatgcagaacaagcatgatattgctgagacaaagcttgtattcacatttgaccacccagcaaaaggtgcaaaggaccacgaaggacaggaaatggtggactacagaggattgccacagacagacaataggagacaagaagtaattacttgggaagtccaacaagataatgtgatgcacggatttggaggatactttgactgtacgctgtatggaaaagaaatgattagcatagtgccttccacacatagtccgggaatgatatcatggttcccagtgtttattcccataaagacacctcttcgtgtgcacaaaggtgaaacaataacagcaaggttttggcgttgtactgatgcccgcaaagtctggtacgaatggatagtagaagtgggcaatcgttcaaccaccctgcacaaccctaatggaagaagttcagaaatgaagttgtgacatattgattattgcaaatttattaaaaaaagattaaagacattttgtattcggcaataaaaaataaaatatatttcttta

SEQ ID NO: 169 - DNA, 2688 bp, Spodoptera frugiperda
cgttcgtttgtttccgttttaccaactgttttgagcctctggcaatgagcgcgtcaaatctcgaaaattctactcactcctagatggcgcctgcgcgtcgagtctatataaacgatctgacgtgccggtaagcgtcatttaattcaagaaagcgaagtgagagatacgctgcgattccacgcgatcttataacacgtgtatttaaaccgcgctagtcaaagagatttcaataagtattctgtgcttactctatacgttaatttgaagaactttttttcaattaaattaagtgaatcagtcaaaatgcccgaagaaatgcagaccgatgtcgccgaggtggagaccttcgccttccaggcggagatcgcccagcttatgtccctgatcatcaacacattctactccaacaaagagatcttccttcgtgagttgatttccaactcttctgatgccttggacaagatccgctatgagtcactcaccgacccatcgaagctggacagcggcaaggagctgtacatcaagatcattcccaacaagagcgaaggtacactcactattattgataccggtattggtatgaccaaggctgacctcgtcaacaaccttggtaccatcgctaagtcaggaaccaaggcattcatggaggccctgcaggcaggcgccgacatcagcatgatcggtcagttcggtgtgggtttctactcatgctacctggtcgctgaccgcgtgactgttcactcgaagcacaatgacgacgagcagtacatgtgggagtcgtcggcgggaggctcgttcacggtccgccccgaccatggcgagcccctcggacgcggtaccaagatcgttctccacatcaaggaagacctcactgagtaccttgaagagcacaagatcaaggaaatcgtgaagaagcactcacagttcatcggctaccccatcaaactgatggttgagaaggaacgcgagaaggagctctctgatgacgaggctgaggaggaaaagaaagaggacgagaaggaggatgacaagcccaagatcgaggatgtgggagaggacgacgaggaggacaagaaggacaagaagaagaagaagaccatcaaggagaagtacacagaggacgaggaactcaacaagaccaagcccatctggacccgcaatgctgatgacatcacacaggaggagtacggtgacttctacaaatccctcaccaatgactgggaggaccacctcgctgtcaaacacttctctgttgaaggtcagctggagttcagagccctgttgttcgtgccccgccgtgctcccttcgacttgtttgagaacaagaagcgcaagaacaacatcaagttgtacgtccgcagggtgttcatcatggacaactgtgaggaccttatccctgagtacctgaacttcatcaagggtgtagtcgacagtgaggacctgcccctcaacatctctcgtgagatgctccaacagaacaagatcctgaaagtaatcaggaagaacttggttaagaaatgcttggaactgttcgaagagttggctgaagacaaagagaactacaagaagtattacgaacaattcagcaagaacctgaagcttggtatccacgaggactcccagaacaggtcaaaactggctgacttgctccgctaccacacatctgcctctggtgatgaggcatgctccctcaaagagtacgtctcacgcatgaaggagaaccagaaacacatctactacatcactggtgagaaccgtgaccaggttgccaactcatcgttcgtagagcgagtcaagaagcgtggttatgaagttgtatacatgaccgagcccattgatgagtatgtagtacaacagatgagggagtacgatggtaagactctagtctctgtcacaaaggagggtctagaactccctgaagatgaagaggagaagaagaagcgcgaggaggacaaggtcaagttcgagggtctctgcaaggtcatgaagaacatccttgacaacaaagttgagaaggttgttgtctccaaccgtctcgttgagtccccatgctgcatcgtcactgctcagtatggttggtctgccaacatggagcgtatcatgaaggctcaggctctccgtgacacatccaccatgggttacatggcggccaagaagcaccttgagatcaaccctgaccattccatcgtcgagaccctgaggcagaaggccgaggccgacaagaacgacaaggctgtgaaggacctcgtcatcctgctgtacgagactgccctgctgtcttctggcttcaccctggacgagccccaggtgcacgcctcccgcatttaccgcatgatcaagcttggtctgggcatcgacgaggacgagcctatccaggtggaggagtcgagcgccggcgacgtgcccccactagagggcgacgctgacgacgcgtcacgtatggaggaagtggattaaaatctcagcttttagccatgttgtaatggtgtttatgtgattgtatcgcgaagttattttgtgcactggtgtacagccaaagactgatttagttcaaattccattattcaaaataaatggtaccttaacaaattatttcctagttttattctgtgttcatttagataggttacccgatacacatcttgaggttcaaattatttaggtacacaccttacattgctttttttt

SEQ ID NO: 170 - DNA, 2708 bp, Spodoptera frugiperda
ttgattgaatatttatttgtaagtttcttatgaaaataaaaatagtataattttttgtaccttcgaacaataaaactgaaagcatcagtagactattaaccttcttactgacatgacagtgacagttttcaaaagtgtcattttgtcacaaatgacagatgacaggtttttgactggagaagggagagaaagagagaagaactcaattccaatctatcaaccattttcattcatcggtttcaaattgaatgaatattgtacattctgtaaaaacaattgcaagctatttagtcatattgtcatgaattataaagtacgaaaagttgctcattaaatctatatttcacgataaagtatttttttaaattgatatacaaccatgtctgctttgcgattgagaataattggttattccacattaagttataagaggttattagtaaattcaataagtaatgccagatgcctatcaagcctttctgcttgtaacacaaccttaaagaaacagaccgtttcaggcctgtatcaaccaaattaccacccagtgagatactccagtgctgctgtagaaaatcaacctgaaactcctaaacctaccacatccaaatcgaaagagacagtgaaaggatcatcagaaaaacgtgaattccaagcagaaactcgtatgctactggacattgtagccaggtccctatattctgataaagaagtgtttatcagggagctgatctcaaacgccagtgatgcattagaaaaattccgttatatgaatgtcagctcggcaccagatacttcgaaactgcttgagacagacaggcctctggaaattagactatcaactgataaacaaaacagaacactcactttccaggatagtggaattggtatgacaaaagatgagctcacccaaaacctaggaactattgcccgttctggttccaagtctttcattgaagagatcaaaaagcagggcaaagaccaggccaactctataattggacagtttggtgtgggcttctactctgctttcatggtggctgatagaattgaagtttataccaaaagcagtgttgaagggtctcaaggctacaaatggtcttcagatggatctggagtttatgaaattcaagaagcagatggtgttgccattggtacaaaaataattgttcacctaaagacagaatgcagagaatatgcagatgatgaaatagttaaaaacatcattaagaagtacagcaactttgtgagcagtcctatctacttaaatgatgagcaagtcaatcagattaagccactctggttgatggaaccaaaagatgtatcacatgagcaacatgttgagttctacagatacatcagccagtcttatgataagcctagatatactctgcactacaagactgatgttccactcagcattagagctatactgtatgtccctgaaggcaaaccaggactatttgaactctcccgtgactccgatgtaggagtagcattgtattccaggaagattctcatcaaaagcaaggctgagaacatactgccaaaatggttaagatttgttaaaggtgttgtggattccgaagacattccattgaacttaagcagagagctgctacaaaatagtgctcttattgtaaaactcaagactgtgttgaccaaccgtttccttaaattcatgattgatatgtccaacaaaaatccatcagattttcatgcattttacaaagagtactctatattcctgaaggaaggaattgttactagtcagaacgctattgaaaaggaggaaattgctaagctgcttaggtttgagtcctcaaaacttccaaatggacagagaacatctctcagtgaatatgcaataagacaaaaggaagaccagaaatcaatctactatttagcggcacctagtcgtgaactggctgaatcttccccatacttcgagtcgcttaagaaacgcgacgtggaagtattgttctgctatgaaatgtatgatgaacttgtactattggaactgaaggagtttaacaacaggaaactcgtctccatcgagaatgacatgcagactaaggctgcagaagaagcagatgatattattggcagtgacgcccttcaacagtctcaggtggaggaagttattacctacctgaaggctcatttagccggcaaaatatttgatgtgaaaacaacatcgaagttggaaacacatccgtgtgttattactgtacaagaaatggcagcagctcgacacttcattcgcactcaagctcaaagtctcagtgaagaaaacagatttgcgcttctaaggccacatctagaaataaacgcaaagcacccgataatcaagaagcttcataagctgatgtcatctgatcccgaattagcaaaaatgatttctgaacaattgttttcaaatgccatggtcacagctggacttatactggacccgaggaatttaattgttcatattaatgaacttctagttaaagctttagaaaaacattagaattttattgttaaaataatataattaatgatttactataaaagtttatgttatgtacttggtaacaagtggtttagattaaattttctttttttttctattgttattttattgttttattttgagttttgtattgagagcataataactggaaactaaaataataacacaaacctttatataaactgtctcatgttct

SEQ ID NO: 171 - DNA, 2762 bp, Spodoptera frugiperda
tatatttttattccagtagtttttctggtgaattcaatttctcccatcatctaccaaaaacaccgagccggtatttgtaatattttttgcttgatgaactaaaatttaaaaacagggctgcaaaatgaagcagtttttattattaactattggtttatttgtcttaattggtactgtaaggggcgatgaaatcggagaaccatctgtagaaaccatagatttagatattggagctagcagagaaggatctcgaacagatgatgaagtcgttaaaagagaagaagaggcaatcaaattggatggactcaatgttgcccaacttaaggagttacgagaaaagtctgaaaaatttgcttttcagactgaagtcaacagaatgatgaagttaattatcaattctttatatagaaacaaagaaattttccttagagagttgatttccaatgcttctgatgcattggacaaaattagaatgctgtcattaacagagaagagtgtactggatagccaaccagagatgaatattcgaataaaagcagataaagaatctggcatgttgcacataacagacactggtataggaatgactaaacaagatctcgttaataatttaggaactattgccaaatctggtacagcagaatttttaagtaaaatgcaaaatgctgatacttcacaagatatgaatgacatgatcggccagtttggtgttggattttactcggccttcttggttgctgatagagttatcgtcagcagtaaacataatgaagacaaacaatacatttgggaatcggattcagcatccttcagcatcgtagatgatccaagaggagacactttaaaaaggggaacaactgtaagtttggaactgaaaccagaagccagagatttcttggaccacgagaccgtccgaaatcttgttaaaaagtattcccaattcatcaatttcccaatttacttatggactagtcacactgaaacagttgaagaacctctagatgacgatgcttcagaagaaacatctccgtctgccgatgaagatgatgcggcagtagaagaagaaaaagaagaagataaacctaagactaaaaaagtggagaagaccgtttgggattgggagttgttgaatgacagcaaaccgatttggaccagaaaaccaactgaggttgaggatgcagaatataatgaattttatcaggcattgaccaaagacaccaaagatccacttaccaaaattcatttcgttgctgaaggagaagttacattcaaagctttgttatatattcctactgtgcaaccatcagaaagctttaataggtatggaactaaaactgacaatattaaattgtacgtccgtcgtgtatttatcactgatgaattcaacgatatgatgccatcttaccttagttttgttagagggatcgtagattctgatgatttaccattgaatgtatctcgggagacgctacaacaacacaaattaatcaaggtaattaagaaaaaattgattcggaaagtacttgacatgttgaaaaaacttcccgatgacgaatatgacaaattctggaaggaattttctaccaacattaaactgggagctatcgaagaccctgccaatcgcacaaggcttgccaaattgttgaaattcttgtcatccaacggaagcggtttaaccaacttgtcggattacgtaaagagaatgaaaccaaagcaagacaaaatattctatattgccgggtcatccaaagacgaagtttcaaagtcacccttcgttgaaaggttattacgtaaaggttacgaagtattgttcttggttgaagctgttgatgaatatgcaatctctgcaattcccgaattcgaaggcaagaagttccagaatgtagctaaagaaggtttcagtctaaccgaaaccgaaggaggtaaagaacaattggaacaattaaagaaaacgttcgaacctctcaccaaatggttagccgatgatgcattgaagaatgaagttgcaaaggccaccgtttccgaaagattgtctgactcaccttgcgctttggttgctagtctgttcggctggaccggaaatatggaaaggttggctttatccaacgctcatcaaaaatctgacgatccacaacgtacttactaccttaaccagaagaaaactttggaaattaatccgagacatcctttgatgaaagaacttcttaaacgagtacttgatgattccagtgacccaacagcgaaagatatggccaagatgatgttcagaacggccacgttgagatctggatatatgctccaggaaaccttagatttcgctgactctattgaagcgatgatgaggaaaacacttggagtgccattagacgaacaaattgaagaagaagaagatttacccgaagacggtatttcggaagaagagcaaatagatgcagatgctgactccaaagatgaggaccacgatgaactttaagtgtcttgtttgtttgagtgtgtgaagtgcaagtgttaagtacaataattgtacgatctgaaaagactgtaattacaattcctttgtatttttgttttacattataaataattatttattgtaatgtgttgctttgtgttaaaatctttaataccacacaatattaaccaaaattacccaggttttgatggtttcgtattgtataatactaaaattaatgctgtgcagactggatccctcttatattagatctcattaggtttcgatataaactactactaagtctgca

SEQ ID NO: 172 - DNA, 4639 bp, Spodoptera frugiperda
tagttcggtcattcggtttgaaaagggttagcggcattcgttcacttcttcaaattcagacagaaaagctagtaatttgccgcattgcattttacgcgctgcaagcaagttagcctgcgggtactggattaccttaatgtatctattatttttgtctattaaatattaaatttgggaagaagtaaactaagtacactgtaggtattggaagtgacaccatgaagtattttgttttggtcggagtcggcatcctgttacttgcaggatggtcacatgcccaagaaggtgtgggcgtggggtccgtggaggaggtgacggtggacgccgacctcggggcgtcgcgcgaagcttcccgaactgatgccgaggcggtactgcgagaggaggaggccatctcgccagacgagctgagcgtggcacagatgagagagataaaggagcgcgcccagaactatacattccagacggaagtcaaccgaatgatgaaacttatcatcaactctctgtacaggaacaaagagatattcctccgagagttgatctcgaacgggtcagacgcgctggataagatccgcctgctgtcgctgacggagcgagacgtgttggacgccaactccgacctcagcattcgcatcaaggcggagccggagaaacgactcctacatatcatcgactccggtatcggcatgacgcgcaacgagctcatcaacaacctgggcacgatcgccaagtccggcaccgccgagttcttgtccaagatgcaggacgcggagaagagcggcgcgcaagagatgaacgacatgatcggccagttcggtgtgggcttctactccgccttcctcgtggccgacaaggtgaccgtggtctccaagagcaacgccgacaagcaacacgtgtgggagtccgacgccagcgccttcagcgtggccgaggacccgcgcggggacaccctgcgccgcggcacgcacatcacgctgcacgtgaaggaggaggcggccgactacctgcagcccgacaccatccgcaacctcgtcaagaaatactcgcagttcatcaacttccccatctacttgtgggcgtcgcgcaccgagaccgtcgaggagagcgatgccgatgccgatgcggaagacaaggcagaggccgacgacgacgcgcaggtcgaagatgccaccgaagagaaacgcgaaaccaaaaagaccgaaaaaaccgtttgggactgggagctcatgaatgacaacaaacccatctggacgcgcaaacctaacgaagtcaacgacgaggagtacacccagttctacaagagcctgaccaaggacacttcgcctcagctcgccaaggcccacttcgtggcggagggcgaggtgacgttccgcgctctactgttcgtgccccgcgtgcagcccgccgactcgttcaaccggtacggcaccaagaccgaccacatcaagctctacgtgcgccgcgtcttcatcaccgacgagttcaacgatctcatgcccaactacctcgccttcatccagggtatcgtggacagcgacgatctgccgctaaacgtgagtcgtgagacgttgcagcaacacaagctcatcaagatcattaagaagaagctcgtacgtaaggtgctcgacatgctcaagaagatccccgactcggagtacgaaagcttctggaaggaatactccaccaatatcaagctgggcgtcatcgaggaccccagcaaccgctcgcgcctggccaagctgctccgcttccactcgtcgcgcggcgaggagatgacgttcctggccgactacgtggcgcgcatgaagcccaaccagaaccacatctactacatcgccggctctagccgcgccgaggttgagaaatcgccgttcgctgaacgtctggtacgtcgcggttacgaagtgctgtatctgacggaggctgtcgacgagtactgtctgtcctcgctgcccgagtacgacggcaagaagttccagaacatcgccaaggagatcttcgacctggaggagaacgagcagcagaaggagcggctggaggcgtacaagaagcagttcgagccgctgacgacgtggctgggcaacaagctgagcgcgtggatcacgcgcgccgtggtgtcgcggcgcctggcgcgctcgccggccgcgctggccgccacggccttcggctggaccggcaacatggagcgcctggcgctgtccaacgcgcaccagaaggccgacgacgcgcagcgccgccaccacctgacgcagaagaagatgctggagatcaacccgcgccacccgctcatcgccgagctgctgcggcgcgtgcaggaggcgcccgactcgcccgacacggcgcgcgccgccgacacgctgtaccgcacggccgcgctgcgctccgggtacatgctgcaggaggggcaggccgtggacttcgccgccgccgtcgaggacatgctgcagcagtcgctgggcgtgcccgccggcgccctgcccgacgacgacgacgaggtcgacgaggccgacgaccaggccgaggccgagccggcgcaggaggaggccgacgaggtggcggccgaggaccacgacgagctgtagagctctactactggagccattccgcgcgactgagtgaacgttccgtgtgtgatgaccatgacgtaactttttatacttgcgagcgtgtcacgtgtgagattatgaattgataggttaatgtaaataaattataatttattattaaaaaaatctatcttaccgattcagaagtacgtcaaaataaaaacaaaaaacatgtttatagggttaaaggtccctaaatgaccataatataacatgtgacccatatgaccataatgtattattgacatattattcttgtgacattttaatattaattttgctaatccttataagacattatatattattaaacaaaacgacgaggatgtaccgaattgttaatcttataagcgttttggatgtatcatctgttagctagtaagataaaacttaaataaataaataaataatatatttaatatcgaggcatacacttaggaatgagggcacacattcattcacgacataaaacaactagatgtcattaaaattaataactagacacacatactttaacagtacagacaaaacaaaatagttataggtattttattatcatctaggctatgggcacactaacctctcccgcgtgtgattaaccggccttaccgcaaaaccacccgcggtattctcaaccttatgtcctaccactaagttctctatgaactactttaacagtgaattggtgtgtgctcattggtgagcgaagatggtataaactgaaagaggtagaaaataagactactctcgaaactgttcgagataacacgatcgatttcaattcaaacctgaggcctatagtcttgagaatattatgtagtcagtaattatataaagttattaaacgaatcaggttcattttacaataaactatacaaagttaaagttcgacgattctttcatttgccgtcacctttcgacattggcagtatggtcgacaccgctgtattggagactttaattatttattaaagaaactatacattaaagaaacaaaaatacaagtaagtttatcgagttaactaaaaatctcgctttactcacattttattaatagatcaaagctctactagtttcgagtcacagagggactctccatcataatttagtttatcgagtgttaaagtgtgtgtgtcgtagcgtagacatagaagaagcaggtaataataataattaacaaatacgtttagacgttcagctgatcactccgcgatgtccgcgtcttctgcgtcattgtttacttgttcgtgtgtaccgttgacgttctccagcctcatctgccggagccgcgcggccgcgtcctcggcggacatgttgctttcctccgcgtcctcaaactcgtcctctccatcgtcaaactcctctccatccatgtaagggtcttcatcctcatcgatctcgtctgcggggtccgggtgcaatgactgaccctggttcatcgccataaacattgcctctaagtcgttgtcgttttgtgggacgaatcttagtttggtcatgggctcctcatcagcgtcatattcatcgtcatcgtctaccggcgcatcgccagcgccctgctgcgtcatttctggtaaactaagttcatgattgatgaccagaatgagtcccggtccagggtccctctgtattgcgtgcagggagatgtttgggtacatgagggtcactgtcggggatggacctccttgtctacccactcctccgccccataccacattgtgttcagtaatgtacaacgttgctgtacccaagtccacatcgttatttacaattaaattaaccgaaggcaattgcatcaaaataccttcggccggtaccgaaaatgatggagatacaacaaccatgttgtttgatttataaactaaaacacttaaattatacaataaactacgctttaagttaattgaatgagttttaaaagtattttagcacaagagcagcggcaaataatcaaatagcaaaataaattcgcatgaaacacgcttcgctaaagaataataaatacgttttgttgtacgtcagttgacaattgc

SEQ ID NO: 173 - DNA, 4717 bp, Spodoptera frugiperda
catcctttcacatttatgttttgggtggtaaatagaatacaagcccagacagacgtttcggtccatctatgctgatgccatctgaatttaagtttcacccgattacaacccatagacaaagagcctagtagttgtaagagcaaaccaagaattcagtttttttaatgtcaatgtaatcatgtatatgtaactaatgtcatacgggaattgcacgaattgaaccggctacaaaaaaagacgttttgcgaaatagaaattattttgcgttgtgccttgactgcatagactgcactaagtgtctgcatctgcgaacgaaacctacccattgtactttgtaattaatcacctgctatattatttttttaattcaattcgactaatatgcctaagaaaaagaccgcctactggttcttctttcaagatttcaaagaagaacaaaggctaaaaggcattacgtatacggaaaaacaggaattggataaagatgccgataaagcatggaggagtctacctccttcagttcgtgctaagtacgaacaaacggcgaagaatgagaaggaaaaaaacaatccaactgttataaagtttgcgtctaatggcgtcccgttgactgtgattgaaaataagaaaaaagaaaatgagatggcgcaaatcaatgaggttcaagatattacaaatataattaaaacgaagtccttcaaccaagaaattttagatgaatacttctacatcatcgacgtaaattcttattgtaagtgggatgacaaatatttgattggcgagtgtaccgttttgaggttcaatctgcgaaatggtattcgagattattacccagtattgatcaaccctggagaaataccgatggggtacgcgtcggatgtaagagtggcgtgtatagagttagggctggacatgccggatgcagaatcaccgagtaacacgatggacatcctcgccaatatcatcgacttccttagacagaaggacctgaaggccggatctctaccgcctctgttcactatgtcggagaaagtactgcctactaagagcttcctggaacagatgtgctacacagctcatgaggatgaaatgatcttccgtgtgtatcgcctggagaagttgttgttccatctggtaaatagtctgaagtccgacaagtacgacgggttacctcatgagtccctcgcgctcgagatactgaagaaagactgtttcagatacagcgaaggactggcttgcagacaccacgcagccagagacaaggccacggagtgcacggactcgcgcgtgttccgctgggcatacagcatcatggacgagtgctgcgcccccgcaggcatcactccccgctccgggacccacgtgccaaaggacatgaacatcgaaaaatacaagcttctaaggaaccctactcctagagctacagtcgctggatatgaggcggcaccatcgtcctccaacaccacggccaacgattctatgtgggaagggagctttgaagcctctctcgtcagtgagccgtcgggagcttggggtgaaccttctggaagtcaggcggcgagtgcctggcctcaacccactggcattccgtcgtcggaaacctggccacaactccctgtcagtgggccgtcgagtgcctggcctctaccttcgggaagtcagtcgtcgagtgaatggcctgggctccctcggagtcagtcgtcgagagcccgcggtcaacattccggcagcggtcgtggtggccgggaatctgagtctgggagacgagggcgtcgcacacacgagcccatgcgcatgccgcaagccgactattcccagaacctccaggcgacgagcgaattaatggagaaacacagtccgctcctaccaggccttggacgtggtcgcaatctagctggcagcttgagcaagatgaacatcaataagaaaaagtaaaacattgaatgccattgaaacttctaccctattattattatgtaatgaatctgatttacttgtaagtatagtgttgtcagatgggctgtgttttcaccgacttaggtggataacacaaatatcatacaaaaatatcgggaataaatacttggaaccagtggcggcataggttggcaactcggcaaaggtgtctgaactcaattcttctttctatataaggagagtgggctcatccgatgaatttgccacgggtctcgaatcatacagttacgccactacttaaaattctatttacattctatgactatggagctatggacaaaaagtctattgatttatctcttttttaacttatattccataatcaatattgacaactatcctacctcacagctatttgaccaaattgctttaatatcttaaatctattgacaaataactagtaatgtacagaaaatattttctcctatcatatttttgtacattattttcgaggataaaagagtgtagtttaaataaaactatatttttagacatctatcccctaatcttataaattaagccatgtaagtctaggaccattacattacattgaccaactttttccatagctcctattattaaccatacgtatctatagcacaagttagcatttcgatagcgaagtcagcccatctggctacacgaaaacatcattattttgtattaaaatccgacgatactcaatattttcagtctcactgctcaatgtatatttaataatgtggaaaacaataagtcatttataaatgtaattgactgactaggctacataggattgcctaaatatatttaggatatatagattgtattggtatgtaggtacttaataaggaaaactgaggaaacttaagactagtgaagtgtgatattaggatggtctaggagtgtacttagtacgttttgaaaagtcaaaattttgagggaaggcttgtttattaacgtattgacattcgatgtcaataaattcattttatttggatttaatcctttaaacttttcccgtaccaaattgtacggataaaattttaaataaaatttgaatcatattcaaaattaaatggtttacttcattaattacctattaaagttaactcttcgagtcgtttgcgttacgggtatttcgttgttccttttccgtaaaacattgagtatcgttggatttacttattgattaaaaactttttgatatttttataatgtggggtttatgctaatctccgtacattccgtattcatattgactgttggaaagccaatttgtaaacccggaattatcgtagatcccacatgtttagaatagttctgacaatcggaacttaaaaattctgaaagaaaccttttacacgtgttatattttacactatcgtctatcgttttagtaaaacttcgtgcagggttgacaaagagttagttataagtataattttgttgcttttccccaaaaaaatattctatttacgtttttatataagttttcttcttggctaagaatgtaattgcaattacttaaaaatagaacgaattccgtgatcgattgttctctcgtttgtccggtatagattcagtctcgaatggttaaatgacattacacatttattaaagaaatcttgagaaataatcagcatcttattaaaaagtattattaaataatgttcaatgttcatatatgtctattgtagtggttccagaatccccccaccgacctgtagatatatacgtagatgcagaatagacacaaaatatcttagatgttgtacgatttagctgaccgatcaatatagttcatcacgccaaacttatagtgccacctgtgctcaaaaacttaacctagtcagttaagtatgtcacgtatttctgcagtacgagcattactttatgatcgtcttttaaatagtggtatctttgtctatctagtcgaaatgaggcagttttcttattatattcagtagtacatagtttggacgcaatctcaatgttggtagtgtttagtacttacttatacgtaagaaagtctatatagaatagatcgcggtgatttgaaaaaaaatatttttcttaaccaaaggatcctttgatccagaatgtatctgagttccaaggcttcgaacatataacatcatgttcagtaaaattaaaattctttctgtgttggattgccgcgagtccattgttacattcatagggatatacccttttaatactataagtactgtcatagttgtaggtatcaataaatatgtattttgatatcgtatatcgtattctcttactcgttttgaaagcggattgtataaaaaagggggtttataaacccaatttggacaagagataaaattgacaatgtatgtttcccgtcgaaattattttgaatagtatttgtagttatataaggtacatgatacctatatacaattttatgtagtttttcgcatgtggcgttggtttaattaagggtaataactacataactacagtcatagatatcataattaactatattcaactataataaaattgcgaaaatctttcaataaactgtcaatgtttccaggcagcctcttagtacactaacgccacctatatatatgaaagcttaatatgtgtgatatgtatacgtggtagtgtttatggatataaaacatgtctgactgtagattacaaatatctattacgaattctatgtgtgatagccataggtacctatgtagtactttcaatgtgtgtttaatgattaaattaa

SEQ ID NO: 174 - DNA, 5598 bp, Spodoptera frugiperda
cgtttgtttgggttcggccggccggtcggtgagggtgcttcttttgtgattcatggattcattctttgttgtggttcggcagcgttcgctagtagacatgtcacgccacccagttcggcagtaaaccataatcgcagttcgtttttcatttaattttgtgcttttaatttaaattcaaattaagagtgtttcattcctcgattttctttttatttgtgaattgtgcctttatacagtgaagctcgaggaatagttcgctttctttgtattaaagtaatcccgaaaaggttgaggattttaaaatgaagctctctctaaatacaatgttgggtaataagcccgataaatgtaaactgtgtatgcttcggaatgtaaaaacggatcatttcgaaaccgagcaacataagcagaatacttgcctgaaggaatatacaacaaacaagtcacagtttattacaaaccgtaaaaaagtagcttcaatctgttgcgaagtcacctcatcagctgcctctaccaacagtaggcaaggaaagatcaagatttctgcgaaaccggatgagacagttgaatttaaatttactctcactaatgacagtaaatcaaattgtctagaagtgattggaatagacttggtacattcacaatttaattttgtgatacccaacaacccttacaagccaggctctcaacctcacatcatagcaccgagaaccaagctgcctgataagatcgtggtcagtttcaaatccccacacattggacaatatgaaactccaatccttttcaacttgaagcagaaagacgctaacgacgagaccattcttttattgagagaaatggtggtgtacgtggaggagactgtgtcgctccatgacaagattataagcccttatgaaagaaaaccagtatgggcaaaagaattatttaggtctccccaaaaagaggactccgatgaaatgttcccgataccaaagagttgcaagacgatctatgcgaataatttgcaagttggtcagaaatcatctgaggctgacaaagatttggccgccgatatcaggcgcacactcgaagtgggtattaccatggacaactatgtgaagttcttccacaacttgctctggtatgaggagactatcatcagagttaatattaagaactataatatgtctggagtcaccatgaaaatccagccaaccccgaactacggtattacctatgctctgactgtgccagggcttagcgaaaagagaccttctctaatgatcggtgacttgctattcgtgaggccgcataaccaaaacgacgtgatgtttgaagctatcgttaaagaggtcaccgagaatgttgcgctgattggaggcctacataccaacttcaccaaccgctattcgctgactgcccaatacgacatccgattcttcctgtctcggatctccctggagaggatgcacaaagctattcacgaaataagaaacaacggccattaccccagggttttcccgaagaagaacccacgcgaagtagaagttaaacccatcttgaactacttcaacccgctggtggaaggtaacgtagagcagcgctgtgcggtggagcgtatagtggcgcgcacgtcgggcaccgcgcccttcctgctgcacggcccgcccggcactggcaagactatcaccatcgtcgaagctgtgttgcagttggcaatacaagagaataagaaaaaccgcatactgatatgcaccgactccaacatggcggcggaccacgtggcgagcatgctcatcaaatacaaacacatgttccccaagggcaagtggctacttcgagctaactccaagttcagaaactgggagacattgccggagtgcttgtataaatactccaacgggataaatcgtaacaacttcgtgaacatcagcatagaagactttacgaagttcagtattgtcatcaccacactgtcccatgcagccaaattcggaagacttatggcccgtcgtcacatgggttttcatgtcagccatctattcattgacgaggcagcccaggccagtgagccagcgtgtctgatcccagtctgtgctctcctgaaacaaaccggtaccctcgtcctggctggagatccccaccaactcggtcccgtcgtcatatcgcggcacgctgcggaaattggactcggaacatctctgatggagcgtctgatgaagactgaggtgtacacggatagccagaacaataacaactacattgtaatgttgcgggacaatttccgatcacaccccgacattttggagattcccgacaaactcttctataagggaaaacttcgggcatgttccgaggaagatcccttgagtgctcttgatatcctgggcgacaagaggaacagtcgcgccatcgtgttccacggagtactgtccaaggaggagaagattggcaagtcaccgagctacttcaacatgatggaatgtgagatggtacagcattacgtcaagcgcttggtgcaggtacataatgtacctcctcacgatatcggcgtcgtcactccgtatgttcgtcaggtgtaccaaataaggaaatcactgaacgattgtggcatcaagaggatagaggttggtaccgtggaagcgtaccaaggccaggagaagcgagtggtcattatatccaccgtcagagcaaactgcaacttgttggactacgacgccaagttccagctcggcttccttgtcgatgataagcgcttcaacgtagccataacccgcgctaaagccaaggtgatcatcataggaaacccgctgtgtttggagaaagacatcaagtggcgaatgtacatggatcgctgccgtgaactaggcacgtaccatggcttcgactccaccatcgtgtccagtgaccgtggacagcagatcgtagataaactaactcctttgctaaatggcataaagattaccgtcaaaaatccaaagaagtaatttttttgattgagctcttctagtgctggactaagtaaggtgtggtacctaatatttgaattaagttgttattttttttaatgtatgatttttatacgaaataggtatggttttatgtcattattattttatcaagtcaagtaacgcacaaattgaagaattttaattcctttttggctatttttatattttaatagataggtaggtatatatatggttaactttttaagtttttttatactacgactgtggttagacacacggaatagatgaacaatacaattttctacaggacccgcttatacttagtcaggcactagactactctccattcatacatggagttgctcaaatttagagagacttgtaaatgtttctaaacgcatttattttaaggaaattccttgaaaaataatcaccaacccgcctatcaatcgtggtgatttaagttttaatgtaatgtttgacggatgagagcttttatactattaaagtaatgaatgaagtagttttctacaccgtattatatcgagatattatacacacatagttaaagacttttgatacaattggaacgcgtggtacattccacttatttttaagtatttttgagataatttgttgtctattacaatttctatttctatttgtttttttacatccgctgcagcctaattatacacctttatattccaaatttctaaaaaatgtgaagatatgtgtgcgtatttttgtaataactatcgtgagacatactagattgattaaaaatagcgttatattgggaaaagctctattagtttcgtaaagagggactcttccttatgagcagcataagaggacgcggtgacgttgtgcttttctcaatacatttacttgagtaaaccgttatttttagttaatttaatgtgtgcattattcgtgactatgaattgcgatcccatattaaaagggtgtaagaaattgttatatataatgaagttacaatgaatttgatctcattgaaaaaatgccatttgtttgttatttgatagaaaattatgtgaataaggttaatataatgaaagggaagcttctgtttggacgtcctatagacgtatttgttacagtatgaatggtgccttggattatacgtaaatcatttaacgtattcgtaaagcttaggatagtataacgtgatatatggagaacttcccttgaaaagaaaattaactgtgattggcttaaagttatatggaaaaagtgtgccaaaaatttaaataaaagttcatagaactatggttcttcggtaaatgtagactggtagtcaaaataagggttttctaatatcgttaaggtgcaaaataggatgcagcggatgtgtaatcttatttacgtgacgtctaataaatgtgatatttttatacaactccttgctttatacttggaccactttttattacaatattgtaacacatttcgccagtaagtttttccgccaaccacgtaggataactgactttaatcaagtcaattaggatttaagaatcatcaattatattttgaatgtatatttaaataatgaaaatctttttaatagacctgtttaataattatttattatggtatttgagtttaatagacgtgacgttagaattctttttaatagatctgtttaataatgatttattaaacattctgttaaaaagattttggggtcaatattattattgacttcacaagtacagcagtaataaggtttttagaaatttcagattttacttgtacgttattagaattatattgataatccctatagttcattccctatattgtttattttcatatgaattatgaattacctatatttttataaatcgatattttactaaacaatggattattttcatgaaatcattgacaagtaggtattttttattttttttatctacctatttgttgtcattagtacattagattataagtacataatatttagtttatacataagtttatgtgttagaaaattaagcacatactgcgttttgcatacacgcatattagtagtagttttgattacaagattaaagaatctacaccaaagattctacccacatattgtgtgaatgtcatagattttagagtacctattgagtgatttattactgtataagtttttggtacatattttaattgctgaaatcgattatttgctgattttgaaccatgtattagattataagaaagtttatagagtgtaacatgccactaaaaataaatgtgaacatacatattgatattttgtcgttctattgatgactacagggacaaaatcaacattgtacttgtaagaaagccaagatatttccataatgttctccttataaagttgtataagttagttgttggcatttttattttaaatatttgatacttgtaaattaattttaacaaattattattttttgtgccataattatatttggaataagaattttgttatgaaaaaattaaactccattatattttagtataatcatttaaaaatgtatggagattaaagaaagagaaaatatcttggtgctaaatgtataagactttgaataaatgtctatacacaaatcaatagaaaatatacacgcattaaaaataa

SEQ ID NO: 175 - DNA, 3248 bp, Spodoptera frugiperda
gtcgcgttccaatgaacaaacagtctacctgcttgtctatcagctcagctcaagctcagctatcattttacgtctgctggtgatagtgtcggtgtctcttctatattctgcattctgcgtcctgcttagaccggtcttgtaaataataaaatagatacaatttaaccttttgtgtgttgactgtaaatgaccagttgtttaaaaaaacagtggaattgtttttaccgcattcctaataatggcattatctgttttagaggacttcgttaaagatctcttgaaagaaaatatcatccagaattatacagcacaaagaataaccgttcgtgaattttacaacaaaaattacagaaatgtgggagggatgtgtttttatgagtttaacatggagttatggagatattggtatataaactcctttaccacaaaaactataaaatttgatgaacgatggatcaattattttgctcttcaagttggaggaagctctgtgaataagaaaccatttaacgaacaggtctatatcaatgacaaaaagtgtctgttgtgtaatgttacttttgacaatcggaataaatatgtaagccatgtagacaaacaaagtcatcaagttcgtttgagctacgctaaaaacaagtcaagttttaaaaacaataaagaattaaaaataactttaatatttaacggaaaaaattatgcggagagaaaacttcaagttcctgtgaaaacagatatgcaagcaaccgtacgcatccaaaatatctcgaaaaaagtaatcaacgttatggacatcattaagattaataacttgttccgagatataagcattcaagaagaatttgagagtggggttcttttgaaaccgtctggttccgttgatgttactatgagggcttatttcgaacatagcgtatctgttgtatatccgattgtagtggttactgaagaaaataagacaatgaagcaaagtttccacttagtcatgtttgaaattgaatcattgtccgaattttctttcttaaagccaaattcaaaaacatttgtgaataaagtaccagatgcttttacgattttctctagtgaaggcgacattgttgtaccaggacagagaccagaagagtttacatcgtactacaaagaacagttaccattgaatcaatttaaaataccacgtgaactagaaaatacattccaagtactactaactaaatatcctcaatttggaatgagagtacctgtactgtacaaaacaatcagtaacatattggagattaccccaggcattgaccaaaataactattttaccaagcttgaaaaactattacacgtagaagaaaatcagttaagaatagacataagaaattatgacaccttgtccactttgaaggttgtcaaaggaaaatccttatatgaactagaggttcctggattggctgaagccaggccgtcccttttacgaaatgataaagtttatataaaagaaaagaagtctgattctgtaaagtatgaaggatgtattcacgtagtacttgaaagaagcgtacatataggattaaatcataggttcaacaaaatatttatccctaacaaaaaattccatatcgaatttggttttaacagaaggtcaatacgagtcgagaaacaagctctatttttagctcatacacatggaattattccatatttatttccaaaggaacttcgaattgaaatgttacctgaaaaggatttggtcttctccgataggaccttgaatgaagaacagaaagttgcagtaaaaaatattgtaaagtgtaggaataccccctttataatttttggtcccccaggaaccggaaaaacaataacggtggtggaatctgtatatcagatttggaaaaaatatcccaagtccagaatattaatttgtgctccttccaacgccgcaactaacgaagtcgctgtacgattaagaaaaattattcctaaatccgaaatatttagacttattgggattacctatgccaacagcaaaactgaactccaagaaataaaagatattgtaaacctaggcaaggataatgcattttacgaaccagctatggaagaattgcttaagtatagaattttgctaacaactgtagtgacaagtgccagacttgtcaatggtggagttccttccaatcatttttcgcacatattcatcgacgaaagtggctatgctacagaaacacaaacgcttattccaattgcagggatttcatcaaccagtgaaaacaaaggcatggttagtgctcaattagtacttgctggagatccaaaacaactaggtccgttggttcattctggatttgctgaatattgcggatacggtaaatcaatgctagaaagacttatttataatgaggtatattctaaaaacgaatccaattcgtttgataatcgttgtgtaacaaaattaatcagaaattatagatctcatgaatcgattattaaaccatcaagcaaattattttataacaatgaactaatagcagctggtaatccatttactgatttgttcatcggttcagatattcttataaacaagaagtttccggttattttccacaatgtagaaggtgaagacaaaagagatgagacatcgccaagtttctataatgtacaagaaattgagcagactgcggaatatatttcaaaattattctcaaataaagtaaaaggaatggcgattacagaggatcatattggtgttattgctccatacagaaaacaggttgagaagctgaaacaagcttgtgcacgaaaaaaatggagtaatttgctaattggatctgtggaacagtttcagggaaaagagaaactaattatcataatatctacagtaagatctaaaaatactagtaaatttgaagatattgacaagatgtgtaatctaggatttttaacaaatccaaagcgatttaatgtagcgttaacaagagcgaaggcccttttaatcgtaattggtaatggaactgttttgaaaaccgaccaaaattggtcgtccttcatacaatactgctccgaaaacaagtctactacaggaaaaagcttttaaatctaaattaaagattattggaaactattttatcaagctattggaagacttagattaagaatatttttttaaaataccaaaatatagttttaagtttttgtcacacatagttttttaagtgtactacaatggtacaatgttttaaataaatatactttttagttattaa

SEQ ID NO: 176 - DNA, 3229 bp, Spodoptera frugiperda
ccgacagtgtcgcgttccaatgaacaaacagtctacctgcttgtctatcagctcagctcaagctcagctatcattttacgtctgctggtgatagtgtcggtgtctcttctatattctgcattctgcgtcctgcttagaccggtcttgtaaataataaaatagatacaatttaaccttttgtgtgttgactgtaaatgaccagttgtttaaaaaaacagtggaattgtttttaccgcattcctaataatggcattatctgttttagaggacttcgttaaagatctcttgaaagaaaatatcatccagaattatacagcacaaagaataaccgttcgtgaattttacaacaaaaattacagaaatgtgggagggatgtgtttttatgagtttaacatggagttatggagatattggtatataaactcctttaccacaaaaactataaaatttgatgaacgatggatcaattattttgctcttcaagttggaggaagctctgtgaataagaaaccatttaacgaacaggtctatatcaatgacaaaaagtgtctgttgtgtaatgttacttttgacaatcgggataaatatgtaagccatgtagacaaacaaagtcatcaagttcgtttgagctacgctaaaaacaagtcaagttttaaaaacaataaagaattaaaaataactttgatatttaatggaaaaaattatgcggaaagaaaacttcaagttcctgtgaaaacagatatgcaagcaaccgtacgcatccaaaatatctcgaaaaaagtaatcaacgttatggacatcattaagattaataacttgttccgagatataagcattcaagaagaatttgagagtggggttcttttgaaaccgtccggttccgttgatgttactatgagggcttatttcgaacatagcgtatctgttgtatatccgattgtagtggttactgaagaaaataagacaatgaagcaaagtttccacttagtcatgtttgaaattgaatcattgtccgaattttctttcttaaagccaaattcaaaaacatttgtgaataaagtaccagatgcttttacgattttctctagtgaaggcgacattgttgtaccaggacagagaccagaagagtttacatcgtactacaaagaacagttaccattgaatcaatttaaaataccacgtgaactagaaaatacattccaagtactactaactaaatatcctcaatttggaatgagagtacctgtactgtacaaaacaatcagtaacatattggagattaccccaggcattgaccaaaataactattttaccaagcttgaaaaactattacacgtagaagaaaatcagttaagaatagacataagaaattatgacaccttgtccactttgaaggttgtcaaaggaaaatccttatatgaactagaggttcctggattggctgaagccaggccgtcccttttacgaaatgataaagtttatataaaagaaaagaagtctgattctgtaaagtatgaaggatgtattcacgtagtacttgaaagaagcgtacatataggattaaatcataggttcaacaaaatatttatccctaacaaaaaattccatatcgaatttggttttaacagaaggtcaatacgagtcgagaaacaagctctatttttagctcatacacatggaattattccaactttatatccgaaggaaattgggattgggttattgactgaagtcaacctggcaatgtcaaacagaaaattaaacgaagaacaggtacttgctgttaaaaatattgttaagcataggagttatccctttataatttttggtccaccgggaactggaaaaacagtaacaattgtggaatcagtgtatcaaatttggaaaaattatcccaaatccagaattctaatttgtgccccatccaatgctgcaaccaatgaagttgctgtaagattaagacaaataattcccaaaaccgaaatatttagacttcttggagctgcctattctcaaaataagcttgagttgcgcggaattgaagatattgtgaatgtagaacatggtgaattttacatgccttccatgcaggatttgctgaaatacaggattttgctaacaacaatagtaacaagtgcaaggctcgttaatggcggcgttccacccaaccatttttcgcatgtattcatcgatgaaagtggatatgccacagaaacgcaaactctgattccaatcgcaggaattttatcgaatagtgaacgaaatggtaatgttatggcccaagtggtacttgctggagatccgcaacaactaggtccattggttcattctggatttgctcaacattgtggatacggtcagtcaatgctacaaagacttattttcaatcagttatattctaaaaatgaaaacaattcatttgacgaccgttgtgttaccaaattggtaaaaaattatagatctcacgaatcgattcttaaaacatcaagtagattattttataataatgagctgatagcagctggcaacgaatatacggatttgttcatcggttcagaaaatctagtaaaccagaaatttccagttatttttcacaacgttgaaggggaagacgtaagagatgaaacatcaccaagtttctttaacgttcaagaaattgaacagactgttgaatacgtttcaaaactactatcgactaaagctaagggggtggctattaagcaagatcacatcggtgttatcaccccttacaggaaacaggttgagaagttaaaagaagcttttgcaagtaaaaagtggaattctttgctcactggatccgtggagcagtttcagggaaaagaaagactagttatcattatctctacagtgagatccaaaaatgcaagtaaatttgaacatattgacaagatgtgtgatttaggttttctgaaaaatccaaagcgacttaacgtagcgttaacaagagcgaaggcccttttaatcgtaattggtaatggaactgttttgaaaaccgaccaaaattggtcgtccttcatacaatactgctccgaaaacaagtctactacaggaaaaagcttttaaatctaaattaaagattattggaaactattttatcaagctattggaagacttagattaagaatatttttttaaaataccaaaatatagttctaagtttttgtcacacgtagttttttaagtgtactacaatggtacaatgttttaa

SEQ ID NO: 177 - DNA, 3226 bp, Spodoptera frugiperda
atgttcgaatagaaaatccatccatataataagaatattgtgctctgctctgcctctgcagtactgcagtttgtctcagataactgaactgattactgaagtgattatttcagctgtggtttaggtgcttagcaactatcaactatatttttatattacggtctgttctataataaaccagggagttagaattattattgttgtaagttgcttgctgatttaattatggcattatccgttttagaggactatgttaaagatcttttaaaagaaaatattatccaaaattatacggctcagaaagaaactgcacgtgagttttatttcgagaagtacagacaacgtggaaagctatcttttttcaaatttaagaaggagctatggaaatattggtatgtcaattcgtatacgtcgcaaacaattaaatttaacgaacaatggataaactattttgctgttcaactcggagaaaactctctgaataaggagccatttaatgagcaaacctatatcaatgaccagaattgttcattgtgcaatgttatatttaataatccagatgaatataaaagccatctggagtggatggatcatcaaattcgtttgagttacgttaaaaacaagtcaattttcaagaacaacaatgaaatcaaagcagtgttaatatgtaatgaagaagaatatacagagcaaaaactacaagttccagtgaaaacagatatgcaaaccacgctacgtatccaaaacgttacgaacaaaaaaattgagattctaaagattatccaaattaacactttacagaaacacgtgagccttcagaaagaatttgtgaaaggaatcccattggaaccatcggcaacagtagatatcactataagggcttatttcgaacacagcgaatcacttgtatatcccattttattacttactcggagaaagagaaaaagttttcatctaattacaatagaagtggagtcagtctctgaattttctttcctaaagtcaaattcgaaaaattatgttagtccaataccagatgcttattcaatatattctaatatgaaagataatattgtgccaggacaaaagctagaagagtttaaatcacactacactgagaagttaccattgaagcattttaaaatacccgataaattagaagagatatttaaaaaactattaacaagaaatccagaatttggtatgagagcacctacgcattacaaaaaatttagtcgggagttggattttactcccggcattgacgaaaccaactattttatcagccttgaaaaactattgcatattgaagaaaatcagttcagaatagatattagaaattatgataccacatctacattagagaaagtgaagggaaaatctttgtacaaactagaggttcctggattagccgaagcaagaccgtctattttaagaaatgataaaatttatctaaaagaaaataagactgattcctataagtatgagggacgtgttcatcagatatttgaaacaagcgttcatttaggattaaacaaaacgtttgacgaaatattcattaataacaaaaaatttcatatcgaatttggttttaacagaaggtcaatacgagtcgagaaacaagctctatttttagctcatacacatggaattattccatatttatttccaaaggaacttcgaattgaaatgttacctgaaaaggatttggtcttctccgataggaccttgaatgaagaacagaaagttgcagtaaaaaatattgtaaagtgtaggaataccccctttataatttttggtcccccaggaaccggaaaaacaataacggtggtggaatctgtatatcagatttggaaaaaatatcccaagtccagaatattaatttgtgctccttccaacgccgcaactaacgaagtcgctgtacgattaagaaaaattattcctaaatccgaaatatttagacttattgggattacctatgccaacagcaaaactgaactccaagaaataaaagatattgtaaacctaggcaaggataatgcattttacgaaccagctatggaagaattgcttaagtatagaattttgctaacaactgtagtgacaagtgccagacttgtcaatggtggagttccttccaatcatttttcgcacatattcatcgacgaaagtggctatgctacagaaacacaaacgcttattccaattgcagggatttcatcaaccagtgaaaacaaaggcatggttagtgctcaattagtacttgctggagatccaaaacaactaggtccgttggttcattctggatttgctgaatattgcggatacggtaaatcaatgctagaaagacttatttataatgaggtatattctaaaaacgaatccaattcgtttgataatcgttgtgtaacaaaattaatcagaaattatagatctcatgaatcgattattaaaccatcaagcaaattattttataacaatgaactaatagcagctggtaatccatttactgatttgttcatcggttcagatattcttataaacaagaagtttccggttattttccacaatgtagaaggtgaagacaaaagagatgagacatcgccaagtttctataatgtacaagaaattgagcagactgcggaatatatttcaaaattattctcaaataaagtaaaaggaatggcgattacagaggatcatattggtgttattgctccatacagaaaacaggttgagaagctgaaacaagcttgtgcacgaaaaaaatggagtaatttgctaattggatctgtggaacagtttcagggaaaagagaaactaattatcataatatctacagtaagatctaaaaatactagtaaatttgaagatattgacaagatgtgtaatctaggatttttaacaaatccaaagcgatttaatgtagcgttaacaagagcgaaggcccttttaatcgtaattggtaatggaactgttttgaaaaccgaccaaaattggtcgtccttcatacaatactgctccgaaaacaagtctactacaggaaaaagcttttaaatctaaattaaagattattggaaactattttatcaagctattggaagacttagattaagaatatttttttaaaataccaaaatatagttttaagtttttgtcacacatagttttttaagtgtactacaatggtacaatgttttaaataaatatactttttagttattaa

SEQ ID NO: 178 - DNA, 3156 bp, Spodoptera frugiperda
aacagtctacctgcttgtctatcagctcagctcaagctcagctatcattttacgtctgctggtgatagtgtcggtgtctcttctatattctgcattctgcgtcctgcttagaccggtcttgtaaataataaaatagatacaatttaaccttttgtgtgttgactgtaaatgaccagttgtttaaaaaaacagtggaattgtttttaccgcattcctaataatggcattatctgttttagaggacttcgttaaagatcttttgaaagaaaatatcatccagaattatacagcacaaagaataaccgttcgtgaattttacaacaaaaattacagaaatgtgggagggatgtgtttttatgagtttaacatggagttatggagatattggtatataaactcctttaccacaaaaactataaaatttgatgaacgatggatcaattattttgctcttcaagttggaggaagctctgtgaataagaaaccatttaacgaacaggtctatatcaatgacaaaaagtgtctgttgtgtaatgttacttttgacaatcggaataaatatgtaagccatgtagacaaacaaagtcatcaagttcgtttgagctacgctaaaaacaagtcaagttttaaaaacaataaagaattaaaaataactttaatatttaacggaaaaaattatgcggagagaaaacttcaagttcctgtgaaaacagatatgcaagcaaccgtacgcatccaaaatatctcgaaaaaagtaatcaacgttatggacatcattaagattaataacttgttccgagatatcagcattcaagaagaatttgagagtggggttcttttgaaaccgtctggttccgttgatgttactatgagggcttatttcgaacatagcgtatctgttgtatatccgattgtagtggttactgaagaaaataagacaatgaagcaaagtttccacttagtcatgtttgaaattgaatcattgtccgaattttctttcttaaagccaaattcaaaaacatttgtgaataaagtaccagatgcttttacgattttctctagtgaaggcgacattgttgtaccaggacagagaccagaagagtttacatcgtactacaaagaacagttaccattgaatcaatttaaaataccacgtgaactagaaaatacattccaagtactactaactaaatatcctcaatttggaatgagagtacctgtactgtacaaaacaatcagtaacatattggagattaccccaggcattgaccaaaataactattttaccaagcttgaaaaactattacacgtagaagaaaatcagttaagaatagacataagaaattatgacaccttgtccactttgaaggttgtcaaaggaaaatccttatatgaactagaggttcctggattggctgaagccaggccgtcccttttacgaaatgataaagtttatataaaagaaaagaagtctgattctgtaaagtatgaaggatgtattcacgtagtacttgaaagaagcgtacatataggattaaatcataggttcaacaaaatatttatccctaacaaaaaattccatatcgaatttggttttaacagaaggtcaatacgagtcgagaaacaagctctatttttagctcatacacatggaattattccaactttatatccgaaggaaattgggattgggttattgactgaagtcaacctggcaatgtcaaacagaaaattaaacgaagaacaggtacttgctgttaaaaatattgttaagcataggagttatccctttataatttttggtccaccgggaactggaaaaacagtaacaattgtggaatcagtgtatcaaatttggaaaaattatcccaaatccagaattctaatttgtgccccatccaatgctgcaaccaatgaagttgctgtaaggttaagaccaataattcccaaaaccgaaatatttagacttcttggagctgcctattctcaaaataagcttgagttgcacggaattgaagatattgtgaatgtagaacacggtgaattttacatgccttccatgcaggatttgctgaaatacaggattttgctaacaacaatagtaacaagtgcaaggctcgttaatggcggcgttccacccaaccatttttcgcatgtattcatcgatgaaagtggatatgccacagaaacgcaaactctgattccaatcgcaggaattttatcgaatagtgaacgaaatggtaatgttatggcccaagtggtacttgctggagatccgcaacaactaggtccattggttcattctggatttgctcaacattgtggatacggtcagtcaatgctacaaagacttattttcaatcaattatattctaaaaatgaaaacaattcatttgacgaccgttgtgttaccaaattggtaaaaaattatagatctcacgaatcgattcttaaaacatcaagtagattattttataataatgagctgatagcagctggcaacgaatatacggatttgttcatcggttcagaaaatctagtaaaccagaaatttccagttatttttcacaacgttgaaggggaagacgtaagagatgaaacatcaccaagtttctttaacgttcaagaaattgaacagactgttgaatacgtttcaaaactactatcgactaaagctaagggggtggctattaagcaagatcacatcggtgttatcaccccttacaggaaacaggttgagaagttaaaagaagcttttgcaagtaaaaagtggaattctttgctcactggatccgtggagcagtttcagggaaaagaaagactagttatcattatctctacagtgagatccaaaaatgcaagtaaatttgaacatattgacaagatgtgtgatttaggttttctgaaaaatccaaagcgacttaacgtagcgttaacaagagcgaaggcccttttaatcgtaattggtaatggaactgttttgaaaaccgaccaaaattggtcgtccttcatacaatactgctccgaaaacaagtctactacaggaaaaagcttttaaatctaaattaaagattattggaaactattttatcaagccattggaagacttagattaagaatatttttttaaaataccaaaatatagttctaagtttt

SEQ ID NO: 179 - DNA, 3204 bp, Spodoptera frugiperda
cacataaacaatcgtcttttaccgatcgatgttcgaatagaaaatccatccatataataagaatattgtgctctgctctgcctctgcagtactgcagtttgtctcagataactgaactgattactgaagtgattatttcagctgtggtttaggtgcttagcaactatcaactatatttttatattacggtctgttctataataaaccagggagttagaattattattgttgtaagttgcttgctgatttaattatggcattatccgttttagaggactatgttaaagatcttttaaaagaaaatattatccaaaattatacggctcagaaagaaactgcacgtgagttttatttcgagaagtacagacaacttggaaagctatcttttttcaaatttaagaaggagctatggaaatattggtatgtcaattcgtatacgtcgcaaacaattaaatttaacgaacaatggataaactattttgctgttcaactcggagaaaactctctgaataaggagccatttaatgagcaaacctatatcaatgaccagaattgttcattgtgcaatgttatatttaataatccagatgaatataaaagccatctggagtggatggatcatcaaattcgtttgagttacgttaaaaacaagtcaattttcaagaacaacaatgaaatcaaagcagtgttaatatgtaatgaagaagaatatacagagcaaaaactacaagttccagtgaaaacagatatgcaaaccacgctacgtatccaaaacgttacgaacaaaaaaattgagattctaaagattatccaaattaacactttacagaaacacgtgagccttcagaaagaatttgtgaaaggaatcccattggaaccatcggcaacagtagatatcactataagggcttatttcgaacacagcgaatcacttgtatatcccattttattacttactcggagaaagagaaaaagttttcatctaattacaatagaagtggagtcagtctctgaattttctttcctaaagtcaaattcgaaaaattatgttagtccaataccagatgcttattcaatatattctaatatgaaagataatattgtgccaggacaaaagctagaagagtttaaatcacactacactgagaagttaccattgaagcattttaaaatacccgataaattagaagagatatttaaaaaactattaacaagaaatccagaatttggtatgagagcacctacgcattacaaaaaatttagtcgggagttggattttactcccggcattgacgaaaccaactattttatcagccttgaaaaactattgcatattgaagaaaatcagttcagaatagatattagaaattatgataccacatctacattagagaaagtgaagggaaaatctttgtacaaactagaggttcctggattagccgaagcaagaccgtctattttaagaaatgataaaatttatctaaaagaaaataagactgattcctataagtatgagggacgtgttcatcagatatttgaaacaagcgttcatttaggattaaacaaaacgtttgacgaaatattcattaataacaaaaaatttcatatcgaatttggttttaacagaaggtcaatacgagttgaaaagcaagctctatttttagctcatacacatggaattattccatatttatttccaaaggaacttcgaattgaaatgttacctgaaaaggatttggtcttctccgataggaccttgaatgaagaacagaaagttgcagtaaaaaatattgtaaagtgtaggaataccccctttataatttttggtcccccaggaaccggaaaaacaataacggtggtggaatctgtatatcagatttggaaaaaatatcccaagtccagaatattaatttgtgctccttccaacgccgcaactaacgaagtcgctgtacgattaagaaaaattattcctaaatccgaaatatttagacttattgggattacctatgccaacagcaaaactgaactccaagaaataaaagatattgtaaacctaggcaaggataatgcattttacgaaccagctatggaagaattgcttaagtatagaattttgctaacaactgtagtgacaagtgccagacttgtcaatggtggagttccttccaatcatttttcgcacatattcatcgacgaaagtggctatgctacagaaacacaaacgcttattccaattgcagggatttcatcaaccagtgaaaacaaaggcatggttagtgctcaattagtacttgctggagatccaaaacaactaggtccgttggttcattctggatttgctgaatattgcggatacggtaaatcaatgctagaaagacttatttataatgaggtatattctaaaaacgaatccaattcgtttgataatcgttgtgtaacaaaattaatcagaaattatagatctcatgaatcgattattaaaccatcaagcaaattattttataacaatgaactaatagcagctggtaatccatttactgatttgttcatcggttcagatattcttataaacaagaagtttccggttattttccacaatgtagaaggtgaagacaaaagagatgagacatcgccaagtttctataatgtacaagaaattgagcagactgcggaatatatttcaaaattattctcaaataaagtaaaaggaatggcgattacagaggatcatattggtgttattgctccatacagaaaacaggttgagaagctgaaacaagcttgtgcacgaaaaaaatggagtaatttgctaattggatctgtggaacagtttcagggaaaagagaaactaattatcataatatctacagtaagatctaaaaatactagtaaatttgaagatattgacaagatgtgtaatctaggatttttaacaaatccaaagcgatttaatgtagcgttaacaagagcgaaggctctcttaatcgtaattggaaatgctactgttttgaaaaccgactcaaattggtcacatttcatacaatattgttcagaaaataaatctacaacaggaaaaccgtttaattgagtctgacttgagaagaaaattcctaattaaattgaagacttattttatcttaaaattatcgcttgaaataacttagtattgtatctttaaaaattaaaatatagtttttaaatatt

SEQ ID NO: 180 - DNA, 3691 bp, Spodoptera frugiperda
cagattcagagatacagccaaaaatcaaaacaacaacgctatggataaaatgccggttaaattaaatttgctgagcaactttaataaatggccaagtcgggtagttaccatacgttattcaacgtcgtcagaattaagttcagtttctttcttttacattctgctctccgggcaaacggacgcaaatctcgaagatggctgattcaggcaaaaaaaaaacaaaacgtgcaggaaaaaaattcaaaaaaaatgctcctcctcctcttaaactgcctactgagcaaccaggcccctcgggatctgatccaaaaagcccaccaagtgcaggatctagcgtacaaagcccaccaagcgcaggacctagtgtacaaagcccaccaagcgcaggacctagtgtacaaagcccaactgctgcagggcctggtccaaaaagttcatcaatagcaggacctgcattaaaacgcacaccagccaaagaaaccggtttacaaagcacaccagctggaggacatggttcaaaaactccaggacctcaacaaaaaagccgaccagctgaaaaacttagcctacaaagcccatcagctccaggacctagtacacaagagccacctgtctggccccctccttcacaaaagaagctcagtcttccacaagagagcaaggctgagcacagagcagcaccgtcagtccgtgaacaacctcctggtgatgtacaaatagaacagaaattacaagcaatacatataggtgaaaaaccaactgaatctgggagtaaatcaaagggagcatcaattttacgtaccaggccaattgaattggattccaaaaaaggtatgtcgggaacactagtagatgtcaaagcaaactatttcactgtggagactacaccaaaatggtgtttataccagtaccatgtagatttttcaccagatgaagacagtactgccgttcggaaggcactaatgcggatccatgccaaaacatttggggggtacttattcgatggaactgtcttatataccgtcaaacgattacgtccagacccattggaactattttctattaggagtaatgatgaacaaaggatgcggattttgatcaaattaacgtgtgatgtcgctcctggtgattatcactacattcagatcttcaacatcataataaggaaatgcttccaaattctgaaattacaattgatgggccgcgactattttgacccgttagcaaagattgacatacctgaatatcggctacaaatttggccagggtataaaacaacaattaatcaatatgaagatcgtttgctaatggtaactgaaataacgcataaagttttgcggctagatacggttctacaaatgatatgtgattatgccgattcgaagggagccaattatagaaagatattcctggaagatatagtgggtaaaattgtgatgactatatataataaaaaaacttacagagttgatgacgtagcatggcaagtcacaccaaaggatacatttaaaataagagatggtagtataacgtatgtggattattataaaaacaaatataatttaattatccgtgatctccagcagcctttactaatatccagatcaaagccacgtgacatccgcgctgggatgcctgaactggtgtatctagtgcccgaactgtgccggcagactggattaactgatgaaatgagaaacaatttcaaattaatgaaggcccttgataactatactaaagtcggccccgatgttcgtatacaaaaactattgcattttaacaaacgattgacccaaaaccgtgaggtcctcaaggaaatggctgaatggtcacttactttatcgaaagatttagtgaacttcaaagcgcgccaactacctcccgaaaatatttatcaaggcaacaacgtatcgtatcaagctggagatacagcagacggctggacacgtagcatgcggtctcaccctctactggctattgctcaaatgccgtcgtgggtagtgatatctccggatagactgcagcgtgatactgagggtttcatagaattaattacgaaaacagcgtactctgtgggcttacgtatgcccaagccggaattagtgttaattaaatatgatagtgcgatggaatatgccagccagtgcgagaccgctatagctcgcaaaaatccggcaatgatattatgtgtattaacgcgtaaagtctcagaccgctatgaagcgatcaaaaagaagtgtacggtggaccgtgctgttcccactcaagtagtatgtgctcgtaacatgacagccacctccgctatgtcgattgctactaaaatagcaattcaaattaattgcaagctcggtggtgcgccgtggagagttactatacctctgaaaggctgtttagtaataggctatgatgtatgtcacgacacacgcagcaaagagaaaagtttcggcgggtttgtcgcttcactagatgatcatttgacaaagttctattctgccgtcaactcgcattcttctggagaggaattgagcaaccatatgggcttcaatatggaaacaactttaactaaatataagatgaaaaacggtagattaccagatagaattttcatataccgtgatggtgtaggtgatggacaaattccttacgtgtatagccatgaggtagtgcagataaagaagaagctagcagaactgtatggcggtgcaccagtaaagatggcattcattatagtctccaagcgcattaacacgcgtatattcttgaatcgcggacaaggcgaaaatccacggcccggaactgtcatcgacgacgtaattacccttccggagcgctatgacttctatttggtctcacaaaatgtccggaatggaaccatatcgccaacgtcgtacaatataatcgagaacacaacagggatgcatccggatagactgcaatggttgacgtacaagttgacccacatgtactttaactgctccgcacaagtccgcgtcccagccgtgtgccagtacgcgcataagttggcgttcttggcagcaaacagcctccacagccagccacactacacccttaccgataccctgtacttcctgtaaagtgatattaactgtatacaaagtagtgccaaacactcgatcatttacattgagaacacgtctctatttacttttacttgcatttaatttgcaaactacgttttaatatttgatctgttttttatttatttattattgagattttatctcagaaagaattttatcgtaaggatgtgttatataaatcgtgttatataggtcttcggtacacaatacacacgtgtctgatcctttcagtagaagggttgtggtaacgcataaaacttcttctttcctataaactaaactttaaaagagttagttataagagagagacagaaggatcagttaaattagccctaaattagaccttttgggcattgccactatcaattttgtatatgtacttcacagttgttgtgaaatactttatacatacttgtttttatgttatataacttttcttgtcattttgtaaaaatgtcatgtgtgttgaaattatgatgttcacataaatattatgtcactgtaaaagttttactggtaaaccttaaggtttaccttagttcggacttttacagtaacataatataaaagtatgtagtatgttaagtttt

SEQ ID NO: 181 - DNA, 875 bp, Spodoptera frugiperda
taaagctgagtttacacagtttacatacaaattgtagttcacaatttacaagggttcacaagggttttcttattactgaaaactttaaacataatttaaatcggaagaaatggttaaaactagaggtaaagaagataatccagaggtagtggtacctgtgccgactgacactcctgctgggaccacagaagaattttcagttgaaaaaattttagataaaagaacaagaaatggcaaaattgaatatttgttgaaatggaagggatataatgaggaagacaacacttgggagccagaagaaaaccttgactgtccagacttaatagcagcctacgaagctcagtttgaactggcaagcacggtagatgatccagaaaaatcaaaacgaaagaatatcactgaagacaacagagcaagaggttttgatagaggacttgaaccccataggattgtgggagcgacagatgcaagtggtgaacttatgttcttaatgatgtggaaaaattgcaaggaagctgatctagttccagccaatcaagtgaatgccagatgtccagaaatcgtcattagttattatgaaaataagaagcaatggtacagcaagagtgctgtcattgaattagattagtttattaaaattataaggataccatacccattttatacaaaaaactcaataaaaacaaataatttagaaactgtagtctcaattcacttattgaaaaatatatttttccgcaaatcgccaggaaattttgacattcctgtcaaaatttcttgaagaaaaagtcaggacttccttactgtaaggaaatgtcatttccttactgtaaggaaatgatatttccgtacagttgttagtgttaaacataaat

SEQ ID NO: 182 - DNA, 603 bp, Spodoptera frugiperda
atggcgtggatagtcatagaagtacatttggaatacagtatagttcctcagttcttcaaaacaatggctgacaagaaaaaggaaggtgaaccagagggagaggaagagttctccgtcgagaaggtgctagaccgtcgagtacgaaatggaaaggttgaatactatttaaaatggaaaggttacaatgacgaggacaatacatgggaaccagaagagaacctggattgcccagatctcatatcagcctttgaagaagcaagaaagaagaaggaagctgaaggtaaaactgtcaaagtagataaagatgcaaagaagcgtaaatctgctgtgccaactccagacttaaaaggtgccaagaaggctaagagtgatgacaaaaaggcgtcaggttttgatcgtggtctagagcctgaaaagattataggtgctactgatagcagtggagagctgatgttcctcatgaagtggcagggcacggatgaagcagacctggtacccgcaaagcaggctaatgtaaggtgccctcaagtggtgatccaattctacgaggagaggctcacgtggcacacgccggcgcccgatgaagctggagccgatgactaa

SEQ ID NO: 183 - DNA, 1610 bp, Spodoptera frugiperda
attttgttttttgtttatagtttttacggtttttactatttcgatttgatttgaatgcatgtgtttatctagtgctgcaaaataaattttatcagaagtactaacgatattgattattgatcaccatgtctattataaaggaaccagtgaatttgaaggccttaatggaaggtgggtatgaatttaccgtcaataatgatgatgaagttatacaacaagacgatcctgaagaggaacgtgaatataagaataatttgttgaaatttatgaatatgcaagtagcaggagattttcaggacgaagattcctatgttcaaggtcagccatttgaagtcatatcctctaaaatgaagaatctgacgaatgatggagcagttaagaagaaagtgattcgagaaggatatggagcgaaaccacaggattcggaaatggtgcgtgtgcaatacaatgcctatatagaatacaatgcagaaccttttgattctacttatgccagaaatagacctcatcagtttcttataaactgtggtgaggtcattgttgggttagatatagctgtgcaaagtatgcaagtgagtgaaaaatcccaatttttaatccaaccaatgtttgcgtatggtgcccttggttgtcttcaaagagttccaccagacactgaggttttatttgagatagaactggtagaaattgtaaatataggggctgcgaaaagatttgaagcattaccaaaagaagaacaaaataatttcttatttgtttacgagtattgtttggcattatgtgctaaaggtaaagatatatattcaagaaacattaaaggtgctataagggagtacaacatggctgtatcaaaattagaaatgtgtcaattagacacttatgaagatcaagtcaaacaacaggaattattgttaaagttatactctaatttactggtggcttgtactaaaactgaagaatataaaaaagcatgcattaattttaacaaaatcaatgaattggtgaaaggaactgatctaaaaatttctgccaaaatgtattacaacagtgctaaatgcctaagaatgttgggagattaccatttagctaaaagaagattaaatgaagcactaaaattagaacccaaaaataaagaaattttgcaggaactagttgagttggaacatacgattaaacaatacaaagaaaaagaatctctagttgccaaagcttttatatctggacaaaaagcataaatgctaacaattatgaatttttgacgaatattatatattctacctttttttattttgttaaaatattaatgtctcagtggcggctctagaaaatttaactggggtaggcaaattaccggggggtgtggaagtttttataattattcagctggaaatcactttttagcgaatttttgattagaaaatggtttcatgacaagaaaaaaaggtctcatggcaagacttttgaggtcccagaaacccaaaaataatagacgtatatattaatatattatgtccgtaaacatgataacttctgaacaaaatatatttttataaataattaaccagagtattatgcagctgctgcattttcgttttgcaaagaaatttaaa

SEQ ID NO: 184 - DNA, 1580 bp, Spodoptera frugiperda
aaagttcaaatgtcattctttggatgaaggctagagcgctaaacatttttcattcttcaaaaaccgattttaataacagtattataaaacttttccagtaaatattccagaaccgcgttgttaatatcttgcagtagccgtagtaaattaaaatttgatccaatggcctctccggtagatatttcaccgaataaagacggaggtgtgttgaaagaaatactccaggaaggtactggagaggaactaccaccccaaggaagcaaagttacagtacactatactggtaccttaactgatggaaccaaattcgattctagcagggacagaaatgacccattccaattcgatttgggaaaaggtaatgtaatcaaagcatgggatattggtgtagctaccatgaagaaaggggagcgggccatgttgacatgtgcccctcaatatgcttatggtgaaagtggcagtcctccgactattcctccaaattctactctcaaatttgatgttgaagtattaagctggaaaggagaagatttgagtccgaatagagatggaggcatagagagaatccaaatcactgctggcgaaggatattcgactcctaatgatggggctcaagttgaagttcatctcattggaaaacacgacggtaggatttttgatgagagggatgcagcttttgctgttggagaagcatcagaagctaatgtaatctcagccattgacatagcgatacaaaaattcaagaaaaacgagacctctagacttattgttcatcctaaatatgcctttggagctaatgcttcacaagaattcaacattccagctaatgctacagtagagtatacagttacactaagaaacttcgagaaattaaaagaaagctggtcacttgattccgaagaaaaaattcaacaatgcaaattgtttaaggaaaaaggaacaaactactttaaaaatgggaagtatgaatctgccgtgaagttgtacaagaggatacatagttatttggagaaggatactgatactgacactcaagaagacagaaatgccttgctactagctgcacatttaaacatcgccctatgtcaattgaaacttaaagagtactttgaagctcgctcagctgctacctctgccttaaatatcgatcccgacaacgaaaaagctctctttagacgaggacaagcatacattcaattgcgagagcccgagttggccagacaagactttacaaggtgtttagagatagatccgaacaacacagctgcgaaatctcaactaaccatttgttcgaaaacgttgaaggaacaactacagaaagagaagaagatttacgccaatatgttcgacaaattcgccaaaatggacacgcagagggaagaatatgagaacagaaaactgcccaatgtgatgagctccgtaggcgaatggggtcaggaagacagagaaagagaacccagcgaatttgaaaaggaaaatcccgacattattctactaaataaaactggcgagtttaaagatatgtaaacattttgtatttcaataaatttatttaaaatcccgacattattctactaaat

SEQ ID NO: 185 - DNA, 5250 bp, Spodoptera frugiperda
atctgtgggccacaattcattcgaaaaggttgaccggcgcgcgactgctgagttttcgagaaaaaataatcaatttaaaagttctcgctctctctaacgtgcttttgcattacagtttcaattaacgaattaattaataaaaatctttcatcatgactgtcgatgaaggcgtagatattactaaaaccggagatcgtggtgtgttgaagaggatcatcaaggagggtacaggaacagatactcctaaccctgggtgtcaggtcactgtacactacacaggaacactcctggatggcaccaaattcgactccagcagagacaggaacgagccatttgaattcaacctaggcaaaggttcagtcataaaagcatgggacataggtgtagctacgatgaagaaaggagaggtgtgcgtgttgacctgcgcacccatgtacgcctatggggctgctggcagccctcccaaaatcccacctaactccaccctgcagtttgagatcgagatgatagactggaaggtggaggacctgtcccctggcaagaacaagggcatcctgcgtcacatcattgagcagggaactggcaacgacgctcccaatgacggcgcgatggttacagttgagctggaaggtagactgcaggccgatggcaaggtgtttgacactagaacagtcacattcccccttggagagggcagcgaacataaagtctgcgagggtatcgagagggctctagagaagttctcgcaaggagagaagtccaggctcaccattcagccgaaatatgccttcaaatctgaaggaaacgctgaactgggcgtaccaccaaactccgtcgtagaatacgtagtgaaattaaatagttttgagaaaaccaaagaagtgtggtccatggatgggccggagaaggttgaacaggcgaagatgtttaaggagaagggaaccaactactttaagggcagcaaattccaactggctattaagatgtacaagcgagttgttaccttagttgaagacatgctagaagatacaagtgaaacagaagaaagcagaaaccaagcgaaggagctccttctatcagcacatttgaacctgtccctggtctacttgaaggtgacgccagctcaccacttcgaggccaaggagcatgcactgaaggccttgaagttggacgagaacaacgtcaagggtctcttcaggaaaggccaggctctgttgggactgggagaggctgaattagccatcaaagacttcgagagggttgtacaggctgaaccacagaataaggccgccgctaaccagataatcgtttgcaagacaacgatcgcgaaacagaagcagaaagagaagcagctgtacgcgaacatgttcgagaagttcgccaaatacgacacggaggtaacaggtggagaagcagcgagctaaagatgagatagacgttataggtgagaaggtaggcgagtggggcgccggcgagggggagtggactgaccagcaacggctgaggaaacccactgagtttgagaaggagaaccccaacatcttactgttagacaaggacggacagttcgagaacatgtgaactcacatcgaactgagttccgggtggatgcttacatagacacagttgtatgtagaaataatcatttattaaaatatctacacaaactctatttgttttggaaagggtacttattgtgacttctcgtgagagattacagtcaaccaaaagtcgcttccatgatgaaactgagtataatattgtaattttcaaattattgccccatcttaagcgaaaaatacaacccagttaaaatgtaattgatgttaattatgtatttttctgtagctaggaatatttctatgtaagcatctatctttgaaaacgccttctgcctcaaaaagtgcattataatattagttgtatattctgatcaaactgtttgtttgtctggacaccttattatagatctcttcaccaaactttagtgtaaaaagtatttttgttaatacaaacaaataagatacaaatagaaactgcaagttgctcgtagattactggttttcagtataaaataacaacttgttgatagtatgctgcgaattaactaaaaatcatagtttaaattaatggaggaaagttctattagtttcgagtcacattaggctgcgcgacgtcgccgcgtctgcacacgctgcttatgatgaagagtccctctgtgactcgaaagtagtagagcttttctcaattaatttacaagaataaactttaatctttagtttatttcgtaagtcttacgatagtactgcgaatttgtgagtttaaattctttgtcattaacctaaatgaattttgaaaatttaacattttttgtatattttcgtatgctcacaatcacgaatcgtctgtcatcaccaaagtccttccgtattgtaatttactaatacttaactaaattgtagttgcaatgaaatctctggtttttgtatattatgttcgaatcaatataaatcattcctctctatgtatgtaagtgagttaggctgtgttcgtccactcgtgtttcgttcgaaatacataaccgatcttagtgcaaaatctggtgattcaacgtctcgtcagtcggtatatgagacaatatagataacacattttgtctcgcgtagatctgcgttccgacatacaacgggtttagtgcagactcgaacaaagtgcatcgaagcgtctttccaaaactgtttgattgtaactaacatgacaaattctaccttaactccacagcataacgcacatattctgacatctgaatcaacgttgtttacgcacagacaagtctcagaagtaatgtgtacaatacgctgtggagttaaggttgaatttgttatgttcagtgatggaaagactcttcgactcagcgctagtataaattgaaccctaagatcgatttttgacacttcttgtatgaatttgtatatgatttttgacacttcttgtatgtcaaaattggagtttctggaccaaaatcggttattgatttcgggcgttagttagttttgtcttgcatgcagtgtaactcaacataatgacgtcttcagtgtaaatattgcacaatacatgctccatttcatcccattataactgaataagtttcaaccttatttctttatggataaagttcgtttttaagtttgatgtgtgtttcaaatcggttctcgtacggttatactgcaagcaatgtgttagcacagtgagtgtcaatttgtagcataatgattttatttgggtaacgagcgggtttgttttctagtacattggttacttgtatttagttatatgaatgagttttacctaataaactgttaacaagcaaataaaccttttcatttagtatctctctctgtttatatagtaactaggttccacccgcgcaactcggctccttctgatcgtagcgtaatcgaacaaataaataattcttcaaatcggaccagtagttccggagattagcgcgtataaacactaactctttagctttgtttaataagtataggatttggatggtgcggtggctaggtaaccggctgccgtggaacgtgtagcgggttcgattcccacacggagcatagagttgctcctgctaattgtttcggatctgggtgtcatatcccaaagagcacgacaagctgtataaaagctgtattttagtttatttttataccacattctgtataatgagactgtacaaaggctgtatcagcgcttaaacagcccttatatctaaaaattgggcccatttttatacagcctaatgcgttattatagctgtacagtagctgtagaagtaaaaaataggctgtaatatagctgctgtagtatggtgtgaaaggaaaccacaggaatatagttatcttcttataaatgtcttttaaagataacgattcttaatcggttttttaagagaatcaaaaagggaaaaattgtgaaacttgtcaaatatttctattttagatacataaatggcgatcgattaataattcatgcaaaattataaatcaagtaatgatcttggactttctgtgtgataatttgtagattcgacgtgcggatttaattttgttgtgaaaatgtgtatactttgtgtaaaaatattcacgcgcccgcaatataatcaagattaagtaaaaaatataactaaacgggtaagtaagtttatggttttgaggttagaataatataatatgcttgaaaatactgcataatattttactatttttactcacactcattattttagctgtaaaattacgatagcagctgtagctattgttaaatatcgtttgatttgtattatgttttgtttttgtttattcaaaaatggcgataaatattaaacagcctaaagtatatctggagggtattttaggtcctgtagctttactacgcagtttttagatgccattgtacagctattgcctttaaataggcattctattagaatatttttaatatttaggctgtatatcagttttcaaaacataaattgtacaggtcattagggatacgtattcaaaatgaaaaaccatgtatatcgattttatatacaatgtgataggggtgagacttctaacccgttaaggctgagttctacatctaattttatcgccaaaaaaaagagatttaagaagtcgtgcgtattctttggtattcgcgcgtctgtgcgtgaacgacgctgattcagatgtcagtagtaatgtgtacgttacgctgtggaattaaggttgaatttgttatgttctgttttggaaagacgcttcgacgctccgctagtatagattgactctcagatcgatttttgacgatttcgtgaacggattttatgtcaaaaatggagtttctggaccaaaatcggttattgatttcgggcgtcagttagttttgtcttgcatgcagtgtaactccacataatgacgtcatcagtgtaaatattgcacattgcatgttccatttcatcccattgtaactgaataagtttcaaccttatttctttatggataaagttcgtttttaagtttgatgtgtgtttcaaatcggttctcgtaaggttatactgcaagcaatgtgttagagcacagtgagtgtcaatttgtagcataatgattttatttgggtaacgagcgggtttgttttctagtacattggttacttgtatttagttatatgaatgagttttacctaataaactgttaacaa

SEQ ID NO: 186 - DNA, 1633 bp, Spodoptera frugiperda
atctgtgggccacaattcattcgaaaaggttgaccggcgcgcgactgctgagttttcgagaaaaaataatcaatttaaaagttctcgctctctctaacgtgcttttgcattacagtttcaattaacgaattaattaataaaaatctttcatcatgactgtcgatgaaggcgtagatattactaaaaccggagatcgtggtgtgttgaagaggatcatcaaggagggtacaggaacagatactcctaaccctgggtgtcaggtcactgtacactacacaggaacactcctggatggcaccaaattcgactccagcagagacaggaacgagccatttgaattcaacctaggcaaaggttcagtcataaaagcatgggacataggtgtagctacgatgaagaaaggagaggtgtgcgtgttgacctgcgcacccatgtacgcctatggggctgctggcagccctcccaaaatcccacctaactccaccctgcagtttgagatcgagatgatagactggaaggtggaggacctgtcccctggcaagaacaagggcatcctgcgtcacatcattgagcagggaactggcaacgacgctcccaatgacggcgcgatggttacagttgagctggaaggtagactgcaggccgatggcaaggtgtttgacactagaacagtcacattcccccttggagagggcagcgaacataaagtctgcgagggtatcgagagggctctagagaagttctcgcaaggagagaagtccaggctcaccattcagccgaaatatgccttcaaatctgaaggaaacgctgaactgggcgtaccaccaaactccgtcgtagaatacgtagtgaaattaaatagttttgagaaaaccaaagaagtgtggtccatggatgggccggagaaggttgaacaggcgaagatgtttaaggagaagggaaccaactactttaagggcagcaaattccaactggctattaagatgtacaagcgagttgttaccttagttgaagacatgctagaagatacaagtgaaacagaagaaagcagaaaccaagcgaaggagctccttctatcagcacatttgaacctgtccctggtctacttgaaggtgacgccagctcaccacttcgaggccaaggagcatgcactgaaggccttgaagttggacgagaacaacgtcaagggtctcttcaggaaaggccaggctctgttgggactgggagaggctgaattagccatcaaagacttcgagagggttgtacaggctgaaccacagaataaggccgccgctaaccagataatcgtttgcaagacaacgatcgcgaaacagaagcagaaagagaagcagctgtacgcgaacatgttcgagaagttcgccaaatacgacacggaggtaacaggttcgcaaacttattatacacgcgcacacacattgtcactatcgttcatttcactggcaccatctttaatattacgtcatcaacacgccactaagccagtgtgcctttaggcttaagtcattatgtctcctgcattaaattcacagagggcagtggaaactatcgttttctttgtcttctcctctaataatatctgttgatttatttcgttgcgggatccaagactgtc

SEQ ID NO: 187 - DNA, 4721 bp, Spodoptera frugiperda
acaattttctagattttctgtttttgattttgaacaacttgaatacttgaattatcattcagttttttagcattatttaaaaaatatattatattttgaaggttatgcgtccatgcaataagctttccaagctattctagttccagacgtatactatttgaacaaaatgaataaattattggaaaatttccataaaattccagttatcccaactggccaagttaatggggtcgtggggatttcaactgaagatgattattcttctacagatgagagtgaagaggaagaaggagaggaatatgaacaagaatatgtagccgaggaaaaaaagaaatatgcatcttttaaggttgatcaggaaccaagcactatgtcagaagtggaaggggttgatggcattactttcaagaacaatccattacatgtatattcgcagtacagcttcaacactacatctcggaaaaaggagctaccaattgatgattttaaagacaagattctgtaccatattggtacatataacgttgttatcattcatggacctacaggatgtggcaaaacaacccaagtacctcagttcatattagattattgccgtgatgagggaaaatactgtaatattgctgtaacacagcccagaaaaatagctacaatcaatattgccaaaagagtgtgcgaagaaagaggttgggcaatgggcacagtttgtgggtatcaggtgggattagagaaaaaactttcacctgattcgattttaacttatatgaccactggagtcctacttcaaaaaataattcacttgaaaagattaaccgagtacactcatatcattatagatgagattcacgaaagaactcaagagttagatttcttgttactgttaataagaaagtttttgtatgcacagaattctacaactaagattattttgatgtccgctaccattaaagctgaagaatttgcaaattatttccaatgtaaaaacgatgtttcgttcttagctcctattatacaggtagacaaggacagtaacttcaccaaaacactttactacttagaagatcttaaatctgtcttcgataccacaaaagctgcgtttccaactttcgatatagataaaccagaaatttcagaaggtctctggaaagtttttacttgcttagtatcattgatcgatcgatttgattttaaagataaatataccaacgagcttataatcggaagtattttggtatttttgcccggtatttacgagatcgaggaggcgcataaatatcttcgtgaacattctgaaacttatgcccagaggcagaatcccaatcgtataaaatgggatataatacctctacattcatccctacccaatgacgaacttgccaaagctttcttacccacgaaaaaaggattcaggaaagtaattttatcgaccaatattgcggagagttccatcacagttccagattcttattatgtgattgacttttgcatgaccaaaagtatgacgatcgaccctattacgaaatatatgagtttaagactagaatggggatcgcaagtcaattgtgaacagagagcaggacgagttggacgtattggtgatggaagagtatatcgtttagtacctcgtgatttttatgagcaaaatatggcggcctccagcataccagatatattaagggctccgttagaacgagtagttttacaagcaaaaatgttggaattaaatgatactccacaacaaatcttgtcattagctatgaacccacccaatctgaagaatattagaatgacaattctcagccttaaagaggcaggtgctttgttacaaacttgccgaaatgaatacaaaatagctgatggtgaccttacattcttaggacacgttatggcatctttgccagtggatataaatctatccaaactaatagtgttcggacatctattcaactgtttacaggaagctattataatggctactggttgctcgatacaaaacatcttttccataccctttcaaaaaagatttgctgcttaccagaaactgttcctttgggctgatgattcctttagtgatctaattgctttgcttaatttgtatcaggtatggcaaacgtgcaaagcagatggaagttttgatgtacatggtgaacgacaatggtgttcgaaaaaccttgttagtttaaaaggtttaagagaatggcaacaaatggtaaaggaaataaatcagcgcttggaatttttgaatataaaacagatccatggacagacggaattacaaatcgacgaaaagcctcttgtattgaagatgatcatcgctggagcattttatcccaacttttttataagagaacaaaacgcaaatgaagtcgacgacaagcaactcgttagagctgttggaggtcgagatccatatcgttcagtgtatcttacgggaatggattctcaacagcccggtcctgtttacattagagctattaagagtctcttcaaaaatgaaaacgatagaaatactaatatatcaataggttttgactctagtaataaaatctacgttgaattcaaagttttaagccaataccaaaatagaatggctatttcaatcaatggtagacagatggtggccgacaccattcttggaaagattccacgcgaagtttatgaagctatcagaaaaagacaactgcagcaccaatttcagctacagttattaccattaaaagaagcttggaaatatgctgaagaaaagggatttacaagaaaaagtgcacttcagaaacttgcccatgaggatatacccatgccctcaacttttgcggatagaaactgttttagtttaggagcacataatcccatacctggattagacgtcgaatggattactctaaaaattacggagtatgaggatgcgggtcatttttgggctaataatttggaaagtgaaccttatcttaccgcaatagaagaaatactaaacaaggctattcttcactccgttgtttctagaggtcaaaccgtagaagtaggatcaacctacgcagctcgattcgtcgaggataatatgttttataggtgcaaagttttttcagtttcgcccacatatgctgaggtacgttttattgactatggaaacatgcaacgggtacctataaaagagatttatcttttaccaaatagaccagaatgttcgtttgagccccttgcaattgagtgtgctttacatggaattaaaccttcaagaaaagctaatataagaggaatatggtcagaagcaaccaccaacttcgtgaagaaacacacttttaatatcttattgtatggcagggtacattctgttgtggataaggtagtatatctagaggtctacaaacgtgatccacatatgaataactctaaatcgctaaacttggttatgcttgaagacggatgggctgaacccgcaatagaaagttatcactcaagggatgactccaataatcgacaaaaagtatacgcatctgacaatccaagggcagaagctgtaaggttgagttttgataaagtccaaagttatgacgattttgatgcgccacagatgtctacaagagggaaaactatatatttgaaaggcccccacagcccattagaaatgaaagtttacagttgtctcgaaagttcaaataataaaactattgatgttgaagggtcttcaattaatactgtattgttagatactgcacctcaggatccacacaccaggttactggtcgcggcttacgtatcgcaatcggctaacagtgatcatttgaaattgcgacagactactctaatgccaaatataccaggactacctatgttgttgacacttctgttttgtcccaaaatgagccccaaagtaactgatgatggcacaaaagtcgcatctattctctgtggtctcggctatgatccaatcacgctaaaatcatattatccatcacatgattttattttaacccttgacacagaattgacggaggacgaagtaaacagagtaaattgcgtacgcttcgcaatgaaccaaggattgaaagtaatggctgaggttgcatttgaacacgctaacccgcgagacatgcttctgaaacaaaaagagttaaagaacagtcttatggagttactgcatgctgaccgcagatccgttgaaagatcaagtgtgccgtatgccaatgtatggcacaaaaataattttgaatcaacgattttaacatccgggatggatgaaaatcaaatatggccactactagattttgtaaaattatgtaatcgagaaggatatcatcccgaagtatctaaaaacttaaacgatttagatctcatggcgagaaagatgcttcctgctgcccccattcaatgttatctgtgtcgggtagaattactttttgtgcatgatgtacgtttccaccttatttccaaagatcataaagaaagagtggcagcatataatccccaatatacaattaagcagtattgattagcatgatgatttttgctgttgctgttggatattttctggatattgtagaattacattatagattttacaatgtttaacataaagaagatgaatctgaagatactaacgaattatatccagaaatttaatctgatgaatgtgttacttattttgatatattttcagttgtgataagcattagtttttaagtgtttagttcacaaagtttgtatttccattgtattttagt

SEQ ID NO: 188 - DNA, 6929 bp, Spodoptera frugiperda
aaaaaaacttcgatacaatcttcgagttgtatttaaactgaaatacctattattttgctgaaacttcaatatttttgtcgagctaaggtttcatattgtgtaaacacagctaataaatacactgagcattttgtttcagtctttagttaatcgtttatagtagtaggtattcgatttctacgttagaacttgaaaatggatgaagttcgagcattttttatgaatccaacgcaaagaattaaactcagggggcctcttactggaggtgctcgaattattactgaagatgacgatgaccagtacatgggcagaaagatggaacatcggcattcagcgttgtctgatgtcggtaccgaatatgcccgcgaagtcaaggaaagagaaactgagttatatttgcggaatgaattaaaccgtgaacaagctgccagtacaagcgtggcaggaggtctagaatctatggagcacctgtctttcggagtctctgtgcccaatatagacgagcttaatgatgaagctatgacagaagtatacaacaagtattcattccaaatgaaagaagatactcaaaatttggctatcaatgcacacaaacagcagatcctggatcgcatccacggttttccagtggttatagtggaaggtccaactgggtgtggtaaaactacccaggtcccacaatggatcctcgatgactgttaccaagcccgacgacaatgtaaaatagtggtcacccaaccaaggaggattgcagccatatctatagcaaaaagagttgcacaagaaagaggttgggatgtaggcggtattgttggttatcaggtcggattggactctcatacttcaactgacacacgtatttcttacgtaactaccggtatattgttgcaaaagctagttgctgcaaaaacaatgaacgaatacacacatgtgatactagatgaggttcacgaaagagggcaagagatggacttcctcttactgatcgtgaagagactattatacacagtgtcgccaggggtcaaagtagtattgatgtcggccacgtttaacaagcagtccttcgctgactacttcatgatccccaccccacgaggcctgcagatgtcctcctgcattaaaattgagaaacaagaacaaatgttcactgttaaagagttctacttgaatcatttgacgaaatttggatcgatccttcaccaatcaacaccaaaaactgatgagccaaccatagctccggagatgcaccatcttgttctgaagcttttgaacgcatttgagcatatagacaagcacgaggaccaaatatcagatcgtgatgatgcagagcttccgtctgtcctcatctttctacctggtattcacgagattgaggacctgtattcttgcctcacggacctggatctacgagaaaagatatgcgacaaagagtgtcgtacgtacaaatggtacgtgcttcctctacactccactatcacgtcggaagagcaggctcgcgtgttccaacgtgtgcagagagggcacaggaaggttatactcgccaccaacatcgctgagagctctattactgtgcctgatattaaatatgtgatagactactgcctaatgaaagtgatggtggccgacccggagacaagtttcacgtcgttacgcctcgcctgggcatcgaagaccaactgcgaacaacgttccggccgcgccggtcgagtgagggacggacgtgtgtacagacttgttactgataagttttatgaaggattaaaacaagaatgcactccggagataatccggtgtccattagagagattggttttgttagccaagctgatggacatggggccgccaagcgacgtgctagctctagccatggacccgccagacatcagcaatatacagcgcaccatactttctcttaaagagacaggagcaatgaagaagacagtggacgacgaatggtgtgccacggacggtgacctgacgtacttgggtcgcgtggcggccaggcttcccgtcgacgtcaagctgtctaagctcattatgctaggttacatttatggatgcctcgaagaagctgttattatggctgccgcgatgtcagtgaagaacttgttcagtagtccgttccgtgaaaggctgaatgcttacaactctaagctgacctgggcagacgggtctaccagcgattgtatcgctttccttaacgtttacaaagtatggagccacctccgtcaacaacagtacttcagatcggccggtcagtcggaggcagcctgggcgcgtcgcttctacgtgcaagcgcgagcgttgcgcgaactcgacgaattagcgaaggacttgcgcaaacgactcgctacactaggcatagacccacccaatggcaagtcgccgtggaacaaacatgaactttctctgctttataaggtgataatagcgggcgcgttctacccgcagtactttattcaagtgtcggaggacgagggccgggagagagacgccgtgcgcacgctcgggggacatgatcctaggaacacggtgtatttgaagaacttccccgacgaccaaccaggcgaggtgtacgccggtgcgatcaagaaagcagttctgaagcaaatctctgaagagccaagagttaccttcgatgggactagcaagaaagtgtacttgacattcaatgatggatcggatgtgaaaactggcaagcaaaatagtggcgaccccacaattcccggccaagtggtcctgccagtgtacaaagctgtgaaggccagacagttacgcatagatgtcaggataccattattgcctcgggacaaggcacaaacggtggccgcttcgattgccttggacaagatgacgttggacttggaacggatggtgcctcgcctgcccgaagtcgacgatacacatttcccattgaagattagtcaaatgacaagtatcaacaagttcttcgtgcaatacgcggacgagagtacggagcgtgagttgcatacaatccagtctgcgttgaacaagtctactctactggctcacacggggcccgtagtggccggggacatactggcagctccgtatactgaggctgggactacgcagatgtgccgtgtcagagtcatggcattattgcccagggagatggtcgaggtatcatacatagactacggcagcgagggccgtgtccacgtgtgcaacctgcgcgtggtcccccccaccgccggctccacccccccgctggccatgcgctgccggctggcggggctggcgcccagtccactgctggacgcccacggccactacacgcccgccgccacgcaacgcttcgtacagctctcgtcacgaggcagattgctcgccaaggtgtattcggtggtacatggaataataaacatagagctactggcagaaggcgggagactcaacgttaacaacgagctcatccggctaggcttcgctgttgcctgcgatgagagttacgaatctaagctaaaccacgacatcagagagatggcaatagatatgaacatggtacagaaacgcgcgcacaacagggaacagttggagatggcttactaccagctgaacgagatagaaccacccagcactaaggaatgcgactccgatgtatgcctcaaaggacctttcagcccgctagagacgacagtgcacaatctgatgttcgccagccgcgacctgcccgtcactatagagtggaactccgtcaactctgtgttactggacactgagccacaggagagatatgaaagactggtggtggcgggcgcggtgggcagcaacgagcagcgctcccggctgaccctgcgccacaccacgctcatgcccaacatccccgcgctgcccgccatactcgcgctgctcttctgtcccgttgcggagctccgccgcaacgcgctgggcacgcggtacgtgtgcgcgctgtgcgggctgggcagcactgacgcgggcaagccctacctgcccgagcatgatctactcatcgacatcgacgccgatctagacgtagaggacattggtcttatcaaccacatccgccacttgatggactacatgatgttctgctacgacggccaggagcagcccactgccgaggacgcgttcaagccgcaagtaccgcagctcatacgcaaggatctactcgcgctcctaatgaagcggcgccggcaccgcgagccggagtacgtgtcgcggacgtgggagtggcggtcggtgggcgaggccgagctgctggagatctcggtgcccgacatgctgcagtgcgccgtcatctacccgctgctggcgccgcaggagctgctgccgcccaccagggaccatctcatgcagctcaagaacgataatgaagaacttaaactgcttgtgtctaggacaccaaatgcttcgagcatggagttgacatgtaaactgtgcaacacaaagacgatgtctctacacgcaatgcgtatacatctatactcaaactctcaccgcgacaaagaagaggatttccaaggacttcagtcgtaaatattacggtttttctttatatttttatcattactttttgtattacttatttagttttaaagtcgatttcgacaataatcattttgtcgtgggttgtgcaaattcgcgtgtctagaaaatttgttatgtaagtatatagaattcttgaatcttaatcctaaattgactatatgtaattctatgtcctatatacatagatcttatattaggcgcgaaactatcaagcgatcctatagtccccgacgattttcgaaattgcctaaaaagatttgtaaaaaggtacctacatttttcgtgagtactttttatgtgttcatactattaagttaggtagtaggcaacgttattgttaatgccaattataatagcaataagttatctttatatatccagcttgaatataaaggttttctaaaactattaccgataggttagttatttttgtcgatgcctcttcatcgcgacatctactacgactagtaacgactaaaagactcaataaattcaggtgcaaagtatagtacaaaatatattgtaaaacatgtatatcaatagcttacgactgcatttttaatactaacaattacaatatgtatcagttaggctaaatttgacagtagcaatttgaaaatcttttttttttttcttctaaagtttggttcatatctgacggaacgtgcgtcgcgtaacgccagaacagacaaatgtatagaaaatcacttgaccgatgatactttagtgcgacgcgtgcgtagatatgagccgactaaggactgatttttgaatcaacaatacccttagtacgagtttgctttacgtttaacgaaaacgaaactaaagcgccttgggcattcattggccggctctattgaactaaccaatcacagcactgaacgcgctctcggtatacgtaaagcaaattcgtacttaggccccagatatttcttaaccatagaataaaattgacatcgtttagtttttaggtattgaagaattgtaaaaaaagttattcctctgataaaaattatctagtaggatagatcagctataattctcctatcttaaacttcttatatcaaagttttctgttaaatgtatggaaatgatttcagtgtttatgtttacgttttttttatttactacttattcgatattactttttattaaaagttatagttttatttgttgatttattttgttttgcatacacctatgcaaaagatttaattgttttcattagaaatccgttttagttaagtttgtgaacaaaggacaatttcatgtatttccttttcttatacccttttgtttattttcatcccgagttcgttttaaatttttctgtatcggacatcttgaagatctgagatattatataaaaagagcgttcatccttccattttttgtttattcgtcgtttttccgtccattcacatacactatataaatgctccaagaacattgttttcatcttgcaaaaaattatagaaatgttattttatcccaccgaggtttgtccttacttcctttctagttttatagttacttatgtatgtgatattctgacttttattactgtgtaagattcaccatagttataaaacatttatttttgtatactcactttaaataaaagttaaacgtcgtagaatttttgtaccaaacaatattttgagcactattctattcgaaccatggtcaaaaaatgtgatctgtaattgtaatagcagactaaggcccctggtgtcaacttggttgtgcaactaattgccggcaaccttatcagcctaacgtcctgcataagcgatttagaagtgaacgcgaagcggtgcggtgacaccgaattcaacgcgatgcggtgtgacgcggcgactaatgtcctatatattataggtgtacgtgaattgtttcgtgacgtgacgtgacgtgacagcatcgcgtctagttcgcgcgaacatatcaagctaattgatcgcgtacggttggtcacgtaggccacattttgacagtttgttgttttcgcgccgcgccttaccgcaccgcattcgcgtctagatcgctcacgcaggaggtcgcattagtatttgttctagcgtacctatgtagacaacatgtttacaggactatgtagacaacatgtttacaggactatgtagacaacatgtttacaggactagtcatacgacaaaacaattctaataaaacagtgctctaatccttagcagctgattgtaataaatactgtgtcttattgttaaagatatatagtttatattcatttaaattaagttaatattaagtaggttctgtgccttttgttttgcctctgattttatattacacgttgacagattcgtgtttagttcataagttacgatatttgactaaataaatgtatattaattaaa

SEQ ID NO: 189 - DNA, 3246 bp, Spodoptera frugiperda
atggctgacaaagaacaagttatccaagctcttagagcaactctgatatcagttaagggggcattgacaataaaacaatgcaacagagactatcgagagctgcagggagaatggatcccatttaagaagcttggttattcatcactagataaactatttcttgatgtccctggttttaaagtgactcaggctaacggcgaatggtatgttgatgccatagctagtcaagaaacgcaacatatagccgctatggtctcacgtcaaaagtcgagcaaaagagctccaaaattaagctatccaaatcgatttcccaaaaaacaaggatcatggcgaaaaccttcgtctggatatgcatctaattacaatagccaatactccaatcaatattatagagctaaaggcagcactccatttaataataacactcaacattacaagacgaataaatacaattcgagtaagtcgaacgaaacgaaattaacggcgaatgtaaaacaaacaacgaagacagtaaatgaccatgtagataaaatactgaaaagttccaattcatcacaaagtttgagagaatccaacaacacacataatgaagagttgaaacaacaagtgcaacgatcaaacaatgatatggatgttaaagtatccaccaaagtatcagcatctcaaagactttcaaatctaagagaccggcttaatacagtggatcttataccattgcagttgcctgctgctaataatgaatgtttggaaagcagtggtcctgttacaaatgttgtgccagctcataacttagaaccacctcctgattctacatcatctgttgaaaaattagcttggacttgtaaaaaacttggacttccagaacctgtgtataaagtgcatgagtttaagccgaaacggggcccttcgagcttcgactgcaccgtgaaagtcggaggatcatatagtgtttcctcatatcctgactcgtcaccatccgaagatttagctaaagaagtcggggcagtgaagttgctttcggctatagaaagttctgaagctggtggaaagccgacttcctcaagtagcaatgctattataaatctaacagagttagtgtcagaacatgaagcagggttgtgggcgttcacagtcccacatctgtacagagaaaaatatcaagaaaacctaccaagcaactggcaagaattagttgaaaattgccctaaaataataaaggaccgactttttaatggacaactagtgttacttcctaataaagaggagatgccaataccgccattagaaacaactatttatgatgattccatggatagcgacctaccaccgttgcagtttcccgacgatgatttttggaacgtatttgtgactgtcgcaaactcaacacttgaaatttggcttcgcataattggatcacagtacagcgatactttcgaaaatttattgctcgaaatggcgaaatattatgaacatgcaggatcacccgttgtcaagtccatgctaattaaaaatgcctggtatgctgttaatttagacgacggcggctggcaacgtgccaaaattttagaaattgaagaagactcggcgactgtgtttctaggtgatcatggagacgacgatgtcgtgtatattaacaaaatcaaaatattagaaccacagtttagaaaacttccagcacaggctatcctgtgtcgtttggaaggcgcggaagaactggcagcgagtacactgggtgccgagctggtgcgacggcgactgcccggcgaggtgctggtggcggcgcccggcccgcgacacgaccccaccgacccttccgtcgccgtcgtactcttcgacacttccacgcaacgcgatctcaacctcaacaaggagataatacatgatttctgcatcgccggagctttcacgattacacagaaaccgtgcgaggtggaggtgggctgcgtgacggaggagggccgcgtgtgggtgtcgcgcgcgggcggcgccgggctggtgcaggcggcgctggcgctgctgacggccgggccctaccgccgcccgctgcccgccgcgccgcaggcgcccgcgcccaacgccaccacgctctacatcgtgcgcacgctcgccggcgactgggttcgctgtactattataagtggactggacggtgaaggaacagtgagaacgcagctcgtagacagcggcttaattttaagagcgcctttatcgtctctagtaccattacagtcgttttctccagccctaaacgcttttccacctcaggcggtgtcggtgcggctgggcccggcggagcgcgcggcgggcggcatggtgccgcgcctgcgcgagctgctgctgggcgcgcgcgtgctgtgccgcgcgctgcccgccgcggggggcgcggccgcagggggcgcgcccgtcgcccctcacgtcgagctgttcgtacgcacaggcccacagaacatcctggcttccgtcaataacgcaatcctcatggaatacgattatttgcaacatggtaaattaaaagaaaacgaaaataatacgacaaaccacgtggaggcactacataaaaagaaggaacgcattttccggagtttgtcaacggccggtgaagaacgtacttcgtctggctccgtcctacctccgccgccgctgccagcgcctggcaagtgcttcgacgtgtatattgcgatggctgctaatccctggaactttgttgtgcaaccaaatagtactagacacactttgcaaacgatgatgtcaactttgcaaacagaatgcccaaaattgactgaactagatgctcctgtaaatccagttagtggagaactgtatacagtatattacgacaaagatgcatcatggtacagggtgacaatcgctgggacagtttcatcagaaatggtctctgtttatttttgtgactacggagatttagctttatttgccaccaaagcattgcggcctgtgccacccggcgccccactagcgcggtcgttaccaccgcaagctataaaagcccgactatatgatgtatggccattgcatcaagactggactgtagaagactgtataagattccaggaattgtgtgtagagcaacagtttgtaggtatttgtaaagatgttggtaaggacccgttaaatccaaatgaacccttattgacacttgatcttatcgacacctctactgatgaagacatttatataaataaacaattagttactgaaggcagagcgcgattagcttctacttcc

SEQ ID NO: 190 - DNA, 8193 bp, Spodoptera frugiperda
tggttgaagttgaaacggcggcggacgaagcgccatgtttattgaaaacgtaacgttatcggaaaagaaagctggctgtgttgttttttataaattagtttagcgaaagtgcgatggtatttacttcagtttgatattcctgtttctaataagacgtgtgagttgtactattgtagtttcttctatatactattgtcgaaaaaatggcagggccgtctgataatcaaaggtcttttcgactttttgttacccatgtagacggtgactctcattttctgaaaattagtggtcaaatagatcaacaggcttcgttaatgatagagagcctatttgaaagttcccgagatagtctagaaaaaggcatcggagcggtgccaccggcagctattcacgaaggtgtcatttgtgccgccaaatacaaagatggtatttattaccgagctaaagttgtaagcacaaacaatttgtctaccggtttggttggagtccactttattgactatgggaataaagacataatttcattgagcgctatacggttcttggaaaactacgacccgctattcttacaactacgtggtcaagcgactgactattacctgtctggggttatgcatccgtctggaagatgggaagaaccacttttactaaaactgcaaagcttagtgtgctattctgactatattgtgactattgaggctcaaactcggacaatacctttaatatctgtacaatttaagggcacggatctagcgtcacatctcgtctctattcgttttggtgtacctttacctattgcaaagcaagaagtcttactacttcaattatctggtgataaccaaaattcatcaaattggcagcctagtgtttcaaatgatggtccaaattttccagaacacatcccatttttaatgaatcagaacttcccagctaatccagcatcaactatgcgcattcagcaaaatgcatcattaccattcaatggaagtatacagatggcaccatctttgattggacaacgattgctagtcaacaaagcatctaggaaccctgggaatttaaaagctccagtgcgccagccacagcatgcccccaacaatagcatcaacctttcaacccctccaccagcactaatgatagcttcaaaatctggttctcccaaaaagtcatctacttataagagcagattgttggaagtaaactctcaacataaagtttttgtgtcatttgctgaagaaggaccagaattatttgcagtgcagcttgttagtgatgccaagaaacttcaggatatgatggatgacattaataagagaccacatagcagtcttactgaaccaccaatgattggcacagtctgcttgggcagaatgtcaggtgaccgtattatatgtagggctattgttatgaatctctctggatctcaatgcaagttattctttgtggactttggggatacagaaatggtatcatattatgatatctttgatatacctgatgagtttgtgaagcctaatgtgtttgcaatgaggttctgtctatctggtgtaaagaaattggaaaagggcctccatttgaatgagactttcaaacagctagtcaatggaaaagtgatgaccctgaaagtagtggcacctgaaggaccaccattgattcagtatggagaactgtacctggacaataagaatgtgcttgaattgttgatggccaatatgaaagacaagctgcagtttaaaaggattgacatactgcctttgggatcaaggcgctccgtgcttgtgtcttatgtggatagctgtatcaagttctttgtgcagttgtcagataacattgatgatctgaatgctgtgatggatgctgtaagggctcactgtgagaacagctcttctcctggagagttgccagtaggagcagcatgctgtgcaagatttccagatgataacaactggtacagagcaacggttagagacactaagaagaacaaagttgtagttatgtatgtggactatggtaatgagcaagaggttgaagtatcagatttgaggaccattactccagacttgataagactgccagctcaggctatgaagtgtgctctgaagggttatgagaacaaaccagtagagactaaaacatcaaaccagttggagatgttagctttggagaagacactgactgctcacatagttggtatgttatccaccacgatggtggtgtcactgactgatgagactgtaaccccacccctggatgtggcccggaaaatgacacaactgtctcaacctaggagctctcatgaggccaaagcaacaaccccagtaaggaaagaccctccagaaaccttcagttctccagacagtgcgtctgatgatggtaagaagaaaggcttccgacgagagaagagtttcaaggaagaatggagaccaccaaaagagggcaatgaagaattccagcaaagaggcggcagttttcgaaacagagacaacagggaaggcttcgataggtctgggccgggccggcatagcgaaaagtttggcggcaggccggagcgaggcgagcgtcctcacaacgatagacgcggagggccgccgaaacctcgtgagaatgtgccgatgtcagtcggagacgatgagtgggaggagactcctcctcaacctacaaccttccaacctcctcacaggcaaaatagagacagggacaacaaccctagggaatacaccccaagagacagagaaaacaaccctagagacagaagaaagcctaggtcggaaaatcaacacgataaacccggtcaaagacctggttggaagaaggattcgagtggagtggggaaaaggctaaggcaagccgcggaagccgcctccttggacgcccaaaacgctcctacgaagggtgcttccatacaggatagactgaaacgggataacaaatatagccaacatgatgaccgtgatgaaagacctcaacgagaaaaccgtttcgatcgttctgaccgccctgaccgtcctgaccggtctgacaggcctgaccggcccgaccgtcgtgataaccgggatagccgcggcgaccggcgcgacaactggggagacaagaaagaaaactggaaccaaaagagggacttccgaccgaatgatagagcgccaaggagcaacttttcgccaagagaccgcgcggatcgttcattcggatcagatgataaaaagtctgacaagagcttcaggtcccaggacagcggcaggggagagcgtgcgggtcgcgccccgccgtacaagagccgcagcaagttcacgcaggtccagtacaaggagctccccgacccagtgccactagacacgccgttcctcgagcccacgtccgtggaacctggcgcacaacacgaggtctccgtcacttggatcatcaacccagaatgcttcttcgcacagataatgtctctgcagcctaaattccttgaaatgatgcacaaaataccagagatatacaaaggcgttaaatcttacactggtgaagtgcctgtgggcggatccgtgttagctcgttaccctgttgatggcgtgttgtacagagctaccatcgaatctgtacagccattctcaaagttcattgttagatatgtagatttcggcaacaaacagctggtggacgctaaagatatttggcagatggataaacagatgatggagttgcctaagatggcggtctgttgctcgctatcgggcgtaatgccagtggaaggagaatggaagcccaacaacctggatatggacttgtgcttcaacgcgccgcggtatcaatgtatattccaggagtttgttgaggaccgctacaaggtgtcgctatggaacaatggagtcagtgtggcggatatgttggtggagaaaggactggctaaactatctgaacaccagtcgtctgttactttgaaagacgaagcgatcgacctgacaatcatcgtaggtcagcagatactgtgccgagtgactcacatagagtcttatgagaagttctttgtgcaactcgatatggacaaagctcagctagtcgaagaagctatcgccaactttgacactgcaaaattgactccattgaccgcagacagccttgccgaagggatccactgcacggtgaagcacgacggtaaaatatacagggctatactagaaaatgttaccgacccagccaacatcactgctgtgttgccagactacggaaaatctattactacttctttggaaaatctcatgatcttaccaacggaactgagtgtctactactaccagtcgctggagtgcagcctaaacaactatactagtcacgctaacaaactgataccgcttgaggacctgaaggccaagcttacaggcagcaaagttattgtctatatcaaccatgtggaagagatcactttggtgacaacattgtacgattaccagactggtcacaagattgccgtattcgaaccggatgaaggtgcctacgatgaagttatcccgttgtgcacgagatccgtcttcaactacaactttggaatggcgtacattgttcacgctgagaacttgaacgaattctacctgcagaaagcaagcgatggcgacagaatcgctcagttactcgacgaactttataagttctatgaagaaggaactcccaaatccctcgctacttacgaaacagacgcaatctgcgctgcgcactccgcggacggcaactggtaccgtgccactatcatcagcgtcgaagatactcaagtcaaagtacaataccctgattatggtaacacagaaacacttcccaaggattctcttaaagtacttgaccccaaattctatgaaccttgtgcattagcattagtagctagcttaggtcttgtagctctacaagaagacactctcactaaactcaaggaatggaccactgaaaaggaagtgcaagtcacgcttgctataggcacagatggatggcttgccagcttgcatctagatggtgtagatttgtcagtgaaattggtaaatgagaaattggctacaccacaaataaacgcagttgaagaagagaaagttgaggaaatcccgactcctgtgctttccgagccgatatctttgcctgaaggctgtactcaagtgtacatcagtcatattgacactcctggccacttctggttgcaaatggccgagaaaatatccaagctcgacgaactccaagcagagctgcagactacagccaacacctttagtgatctggaaaatcctgaattgggtatgtggtgtatcgccaaatatatggctgacgatcaatggtaccgagctgagatccttgactcggattctgacatcattacgattcgtttcattgactacggtaataccgatgtgctagacaaccagcccggattactaaaggaaatgcctgcagctttaaaggaagtggaagcttacgcgatcaaatctagcattaacgccgtgcccactggtaccggccagtggtcagaagcatcctccgaatatttcacgcaacttgtaggcgatttatcaaacgcggtagatgccattattgtccttaaagacgtaataacgtacgtcgatatctatgttcaagggaataatgtgactgacaaattagtgactgctggctatgccaccagatcagaagaacctgactgcggtgacttgccgtcctgcttcgccagtcatgttaactcaccatccgagttctggattcaattagaaaccgcgaccgcggagctacaagcaatggaagctgcgatggtagatgcagaaaacttcccagaattgacagacaaagaagaaggtgttatttgcgcagctaaataccctgaagatgaagcgtggtacagggcacaagtcattgtggatgggtcagaaggaaccgaggtgctatttatggattacggaaatgcgtcgatagctaacgaattaagaagtctaccagatgaacttaaagtgaagcctgcgctttccaggaaatgtgccttgcagaaacctcgtgacgttaaatggtcacgtcagtctgaagttaggtttaatgaattagctgccgaaggagccactatatttaatgtccaattcatagcttctggtgatatatctatcgttgaattgttccatgaaggaaaatccgtgactgaagaacttctagggctttgtgaacaaattccgactccaagacccactccagtgggtcaagatatatttggcagcggcaaaatctgcttcgtcaaagatttggacgaattctatgtacaactagatgaagttaactccgatctcgataaagtgacggtaagaatgaacgattttgaagaatttgaacctgccactgatttaaagataggatccatatgcgctgcattctgggctgacgacgaacagtggtacagagccaaaatattagagttttgtgacgttggttatcatgtccagtttattgactatggcaacaaagctaaatgcgaagagtttagaaaactccctgatgatatcgcatcaattgaacctttagcgagaggctgccgtattatcttagaaagtggcgatgaaagtttgcaggaagaaggtaaaaataaattagatcagctcaccttagatgacactactgttcgtattgaatttttggatagtacagttagtccaagtcttgttaagctgtcgtatgatggacgcgacttctatactgaccttaaaagtagcaatgttaccaaccaaccggaagaaacaccaaaagaagaagctcttgcgtctactgaacaagaagttgtaaaagaaactagcgagcctaaagctgcaacagcatcggatgtcgcgaccaatgacatagacgcgttagaatcagaagaaactcaaagtgaacagaatacatcacaagctgatctcaatgaaagtacggagagcaaccacactgttattgagaacaaatcttacgaatctaaacatgataatctgagtgacgaaattgctgccgctgaagtaaaggctgaggcagaaactggtaaagactctgataataacacagaagttcctgagcaaaccgaagtaaaggatgcgaaaaataatagtgcagaaattgtcgacgatgccaaaaataaggctgacaatactgaacaagctagtgctcaagtagaaacagtagaacaaactgccgaaacaaaatcggacgccgtcgaaaaagaaagtaaacctgtagatgtcgtgacagaaaatgagaacacagctaaagcagatgacaaagttaaagaaaacgtagaaaaatctgaagtaaatgagaatgaagcggaaaaacccgttatcaaagaaagtgacgtagaaaaacctgttgacaaagtgacagagccactggccagcccagtaaaaaatgtgactgactcaacagaagtgagtgaagccggtgacactaagacagaaactgttaagtagacttaggatgtaaatacgccagtataagatattttagtgagtaaagaaaaaaaattacattgtatcatatttatctttttgaatgtaaagtgtcttacaactgtttgaaattatacatgactttagtttgcttcgtatatggtaaaaccaagtgccgtagttgtttcggcattaatgaagcagcttatttttatacattgtcgtacgaagtacataaagactaaacgtagttaggcttggcgtatgattgttttgcgttatttaaaattttttaacgttgttttttgtgtatgcttctcgaatcacgtaacttgatgttatgaaagtttcaggaaacatttatcgtttaatgtctgtttttgttgtgtgcttaaattgatttaatgttatcgcaaagagtataaacgtaaactaatgaaagtatattatagtgattgttttacacgcatataaatactcataatttgatttattttaggtttatcgtatgttatgtcggtattagtagagttggttattagagcacatttcatttatcagttcatgagtaacggctggaacctgtgtatgtatacataatttattgtaattaaacacattcccttcatgatccgtttgtagcatgtcaccacaactacataccgaaggtatatttgattattgttgttatgtttagtaatcatcttataagatttaggactgatgtctgtcttgtccagagaaggatgttatgtttttttttattaaagatatgcaaaaaata

SEQ ID NO: 191 - DNA, 2459 bp, Spodoptera frugiperda
  misc_feature (1401)..(1403): n is a, c, g, or t
gtggactattgatattctaaaatacttgatttgattttgagggtaccagaaaaaaaccgaatcagtttgtgaccagcaaaattagttacgttacatgcgtggacgatatggtggactattgatattctaaaaacttctttttaatttgttagttttaaagtaccttgtaagttaactacgatggattggagaaaagcacaatttgttgttttgtcaactgctactgtgattgtcgcgacacaaatagtaaaaaaagcttacaactatttttttaaaccaagaaatgaacctgcgatatctgttgacgacatgtgcgaagttacacaaaatcttagaaaccgtgatataaatgatgtgatagtgttctcaaacgacgcgactcaacatgcaataagagtaccgccaacgaaagatatcttgatatgtgaaagtagagatttaaattgctataaactactcacatacataaatgctacacgtgagaccttggacgtttgtatgtatctaataactagcaaagaaatatcagaagcaattatacgattaggacaaagacatgtcataattagaatagtagttgacagtgatacggcattcaaaccaccatcacaaattaaaaagttaaaagaatacagtttcatccaagtgcagcccagcaaaaagactgttttaatgcaccacaaattttgcattgttgacgggccaaaagccattcatcgtaaaaaactattaaaagctcaagccgaaaagttaaattctcatgcgaaagatccaaaaaaaccagtgaaaatcccgcctaaggtcaaaatcacaggttttgtaatgtctggttctttgaattggtcctcccatgcaatggtttcaaatcatgaaagcgttattgtaacatcacatccgaaaattgttgataaattcgaaactgagtttgcaagtttgtgggtggacaatgacccgatattgaagtcgtcgttgaatgcgtcgtgattatcctacatgtattttgcactgcacaagtaaagtgttacaacctcacatatgcttttaacaacttgatgataaatatgaaaaaaataccacatgtgccagtgtaaaatatgtgttaaaaatattcatgaagtgaacgaattaaacaaaaattgtgccaacgaccaatataaaacgtgaaaaattaataatattattgaaatgtgtgaaagtcaacagttttcagttgtgtttataaagtgcacattggatgcagtgttctttcgctagatggcgctgtttggattgttgcttagcaagtgagatacttgttcagctattcgccgctaggtggcgttaacgggtgagtaccattacggagcttgcgaatttccgctttgcctgaggtgtttctattcgagttgagtgaacgataannnatgaggttgacggcggccccttgataacaccatggtacttaccagcgccaccaatcaccacttgcagcaacgatcaaacgcgaccagtccgatgccgagaccttgttccatctagcgtttagcatattagcagtccaccattatattggactctttatgttgcaatcacattgtgtaaattacattctacaatcctagttacatctggaatattacgaaatctgcagtcagcactcatcactggacttgtctcattgttcgtatacattcaatacatgatgacgctacattgcaatttcgtacgttcttaggatatgttgattcagaacattttgaagtccaatattgttacttaagtaatactagctatacattttatacatttaccatactttatggtaagatctcggaggaaaatacaaaaatgctcctttagtttataagttctgtgactttgaaacactttgtgatctttattacgtttttctgttttcctccgcgatcctctaagttcacgcatttttattgttttgttactctattttatgttcgtgttgtctatacgtgttttgaattatattgactaacaaatactaaaaaattctaacgcatgactccttatttttactatatcaactcgcgagtatgcatgacgtcaaataatgttgttaatttagtttaattttattatttttttgttaaacacttagacaacctgctacactgacatgtttatattattttaatttatttgattgtttatatttattgattgtgtttacttcaacaatttgtaaagtttattgaattctataccagtatgagatcaatcgtatatgttagccttgctccataaaacttgattttacgtttaattttcatcgcttaaattcgagttttagttcatgcatggcaatacccggggttgctttctagtttttttgataagaaaaatttgattatgcaatctgttaattaaattaatcactcaattatgttatatcgaagttattgttttatttgtattgatttaagaacagattgcataatcaaatt

SEQ ID NO: 192 - DNA, 3786 bp, Spodoptera frugiperda
atgaaggactcgaagggaaacgcgtggcaattgaaaccaggggaaaaggagaacgagaataaattaccagacccattgaatgaagatgtacagaaaggacaattctctgacacgagttcagaaccatctgaagccaaggctgaggaagtaccaagtataccttttatcacactattcagatttgcatcgacaagggacaaactcttcataatctgcgcattaatatgttctgcggtcgccgcgatatctacgccactgaacacgctgttgcttgcgtacttactagaggctatggtcaactacagcatctttggtgatgctgactccttcatgaagtcgttactgaacttcgccatatacaacgcggctgttggagcggcccttgtggttctctcttacgctgccactactttgatgaacattgctgcttataaccaagtatatgtgatacgtcaagagtatttgaaagccgctctaaaccaggactttggatactttgatgttcataaaaatgcagaaatagctaacaaaatgaacagtgatataatgaagctggaagagggtatcggagagaagttagcgaccttcttcttctaccaggcctcgttcttgagcagcgtgatcatggcgctggtcaaaggatggaagcttgctctgctgtgcctcatctccttcccggtcaccatgacccttgtaggcgttgctggattgatagctgcaagtctgtcaaagaaagaagctatagcgaccggtaaagcaggtgctatagctgaggaggtgatatctgccatccggactgtgtacgccttcagtgggcaggagaaggagctcgacagatacgagggacacctcaatgatgccaggaagatcaatgttaagaagagtttgttcaacggtctggccatgggttgcctgttcttctgcatattctgcgcgtacgcactctccttctggttcggttacagactgatggtaactgatggatatgatgtttctaccatgattgctgtattcttcggtgtgatgactggttcagccaacttcggtatatcgtcgactctgatggaggtgttcggctcggcccgcggagccggcgctcacatcttcaacatgatcgacaatgtgcccaccattaaccccctacagaacaggggcactgtgcccagtgatattgagggcaacatcgagctgaagaacgttgagttccactacccatccagacctgatgtccctgtactaaaaggtgtgagtataaaggtgaagcgcggtcagtctgtggccctggtcggccactcaggctgcggcaagtccaccatcatacaactcatctccagattctacgatgtcgtcgaaggaagtgtcgcaatcgacggtaacgacgtccgcgacctatcagtccgttggctccgcgagcagatcggcctagtaggccaggagcccgtcctattcaacactaccgtccgggagaacattcgctatggacgggagaacgccaccaatgaggagatcgaagcctgcgccagacaagctaatgcacaccagtttatcatgaaactgccgaagggttacgacacgctggtgggagagcgtggtgcatcactgtcaggtggtcagaaacaacgtatcgccatcgctcgagctctggtacggaacccgaagatattgctactggatgaggctaccagcgccctcgacacctcttctgaagccaaagtacagaaagcacttgataaggcacaagaaggtcgcacgacaatagtggtggctcacagactgtccacaatcaggaacgtcgatgtcatatacgtgttcaaggctggtttggtggtggaatgtggcaaccatacagaactgatggcaagcaagggacactactacgatatggtgatgctgcagaacctgcctggcgtggatgagcagtcgcctgaaaaaactaaattgtctcgcgagacttctataatcagtgagaaggatgacgaagacgagttcttggaattccggaatgatgacaaagaagaggacgctgccgaagctcctgacatttccttcatgagagtgttgaagctgaacaagccggagtggaagtctgtcaccctcgccagcatctgttctctcatgagcggcttctgcatgccactgttcgctgtcatctttggagacttccttgcgttacttgatggcgacgatcctgatgaaattcaaaaaggagtgtcacgattggcgttgatctttgtcggcatcggagtgttctctggcatcactaacttcattgtggtattcttctacggaatagcgggtgaagcgttgaccaagcggctgcggctgatgatgttcaggaagctgctggagatggacatcgggttctacgacgacaaggacaactccaccggagcactctgcgcccgactgtccggggaggccgccgccgtgcaaggggctacaggtcaaagaatcggtacagtggtacaggcagttggtacattcggcttcgcgctggtactgtccctgatcttcgagtggcgagtgggtctggtggccctgaccttcgtgcccatcatcatcttcgtgctgtacaaggagggcaggatgacttacgccgctacttctggcaccgtcaaggtcatggagactagttctaagatagccgtagaagccgtggccaacgtccggacagtagcgtccctgggtcgcgaggagacgttccgtcgcgagtactcgaagcagctgcggccggcgctggacacggccgtgcggtcctcgcactggcgcggcctcgtgttcggcatgtcgcgcggagtcttcaacttcgtcatcgccagctcgctgtactacggcggaaccatcatcgtcaacgaaggcgtgcctttcgaacaagtcttcaagtcagctcaagccctattgatgggtgctacgtcagcggcgcaggcgtttgcgttcgcccccaacttccagaagggcatcaaggcagcaggccgtgtcatcgttctactgggcagacagtccaagatcacggacccagtggaacctgctgtcaaacacttcaacggtacaggagaagcgagtctgcagggcattcagttcaggtacccgacccggcctctggtgcgcgtactgaaggacctgaacctggagatacagcgcgggaagaccgtggcgctggtgggggccagcggctgcgggaagagcaccgtcatacaactgctcgagaggtactacgatcctgaagacggcattgtggctcaagacggcatcccgctaccgaagctgaacctagtagacgctcgacgcgcgatcggcttcgtgcagcaagagccgatcctgttcgaccgcaccatcggcgagaacatcgcgtacgggaacaacgaggcgcgcgtctccaacgacgaggtcatcgaggcagccaagcaggccaacatacacaactttatcacttcactgcctttgggttacgacacaaacatcggatctaaaggcacgcagctatcaggtggacagaagcagagagtggccatcgcgcgcgctctcatacggagacccaagatgttactgctggacgaagccaccagcgcactcgatactgagagcgagaaggtggtacaagaagcattagataaagctaaagcaggccgtacgtgtgtgatgatagctcatagactcagtacagttagggacgctgacgtcatctgcgtcatccacgaaggacaggtcgcagaaatggggacacataacgaactactcgaacttaaaggactgtactacaacttaaataggagaggatacgcttaa

SEQ ID NO: 193 - DNA, 1403 bp, Spodoptera frugiperda
tatctctccaacaacatccaattcgtcaaactcgaatcttatcagctccccagctaatcaagcgactatttaactcccacttaaacaccaagcacaagaacacattccacgtttattttaaaccatcagcagatacacgacaattaacagaagctacggacgcagaagataccggcatccggtgatattgaaagtggtttaaaaaaaatagatagataataatatggctttcaagctggtggtgggcgccacggccttgatggccttttctcttctgagccagagcgtagaagccgctcagctgcagggagtagcaagaaataactccagaagaggtatctgtaccttggaagttcctactattgacctaattcctgcagaagacagacatggcgttatacctagaggaaatggatccagaaacggatacagtaaaatagatgtgtgctgtagtggatacgaaagagttccaagaacccacttgcaatgtgagcctgtctgtgatcactgcgaaaatggtaactgcacgtctcctggtcattgcgaatgcaagcgaggatggatccatgatccctaccataaagactgcattcctacttgcccagaaaggtgtctcaatggtgtctgcaccatcactggccaatgctcctgcaatgccggaaacacactcagctctagcggaaaatactgccttcctcactgtagcggaggctgtggtgttggaggaaactgcgtaggtcctgagacctgtgcttgtgacaaaggtttctctttggatgcaagaacccgcaaatgcaactaccattgcgaaggaggctgtggagaaggaagctgcattggaccgaaccaatgttcctgcaaaccaggatatagacaagctggacactcttgtgtagcagattgcccaagaggatgccacaatggagactgtgtagcaccaaacagatgttcttgtaaagctggatgggctttggatggtactggaaccgtttgtactcctcactgcaataatccatgcctgaatggtgactgtgttgcccctaatcagtgcaaatgtaaagaaggttacattgaagctccaaactccattagaagccagacctgcgtagcccattgcccaggaggttgccctaacggctcttgtacagcccccaatttctgtatttgtaaccctggctacgtaaaggaacgcaaaggaagcaacaactgtgttagaagagtcagaagatcattgatgcacatggagttgatccctgaagcagttttagaaggactgtaaactgttagtttgtatatttgtttgtgacgatgttttttactctaaattttgagattttataaatttttatgtattttaaaatatgagactattaataaagttataaggaagttaaatataaaaa

SEQ ID NO: 194 - DNA, 795 bp, Spodoptera frugiperda
aacaatgcttaaaaccgcctattctaacaaattttcaaagggcggtgccgcaacttgaatgttcatgaaatacgtgtgttggtcttttttgaaaaaaattgatagttgataagaaattagtgtttttgttaaatattgttgttagtacggtggtaaaaatactaatctctaataacaatatgctttttgatggatttattgcggtatagtttttctgtcgacgaaaattggggtgataccaaacttttgaacggtagtgtacaagtggatatgttaggactgacatgtacagctgcaagcctttctgctccagtggctgcccacacggcacctgtatcggccctgagacttgtatatgtaataacggatgggaaatgattcaatctcaaggatccaccaacaaaacctgccagcctgtctgctcaaagccttgcgtaaatggaatatgtgtagctcccgagacctgtaaatgtacaaatgggtataccaaatctggaaattatagctgcgaacctttttgctcaaatggatgtctgcatggaatttgtgcagcgcctgaaatttgtaattgccgtccaggatggcatatatctaatgacaataaaacttgtctcccagtgtgttcaaagccttgtgtaaacggcacatgtattgcgccgaatacatgcaagtgtttgttgggttatagagtttccggtaaattcacgtgtaagcctcactgtagcgatggatgtccaaatggaacatgtgtgggtcctgaaaagtgtgactgtaaagcaggatggcaattaacca

SEQ ID NO: 195 - DNA, 4239 bp, Spodoptera frugiperda
atggaccgttttataagcatgtggaaagttcgggagttggcggataaagtcacaaatgtagtgatgaactacacggaggtggagggcaaggtgcgcgaggcgacgtcggacgaggcgtggggccccacgggccagcagatgcaggagctggcgctggccacgttcacgtacgagcacttccccgaggtcatgtccatgctgtggcgccgcatgctgcacgacaaccgctcgcattggcggcgcacatacaagtgcttgctactgctgagctacctggtgcgcaacgggtcggagcgcgtcgtgacgtcggcgcgggaacacatctacgatctgcgctcgctcgagaactacacatacgtcgacgatgttgggaaagatcagggtataaacataaggcacaaagtgcgagaactgatagacttcatacaggacgatgagaaactgcgcgaggagagaaagaaagcgaagaagaacaaggacaagtatataggcatgtcctcggacgcagtggtgatgggcatgcgcggcggctccggcgcctggggcgagtacagcgaccgcagcgggaactgggaggagccaaaagagaggaacgatgaggatgagtatgagagagaggactctgacggagactacggacaccatcgcgagaggaggccacacaaagaaaacgtataccgcgactcggacgtagtgagttcgagtccacctcgagctcggtccctggagcccggggagcgcggggatcgaggggaccggcccgagcgaggagacagagggacacacaaaccgttcagcatcaacctcaagagccccgccaaacagaaacccagcacgcctgtcaagaagattgacctcggcgcggcagcgacatacgggcagtcagccagcggcgccagtatcgctgggcccgcggaggctgcgccccccgcgcagtcgcaggagctgctggacgacctgttcaagacctgcgcccccgccacgcacgccccgcacaacgatgtactcgacgacttcgatcccagagcggaagagccccttcctcgcaaagtatcgaatgaattcggcgactttacgaacgcgttcggtcctcccgcgaataacaacgaaggattcgcagacttctcgagcgccttcactgacaacaacaactccaacaacttgctcagcgccggaaccaacctggcgcccactcctaaccttatggcgccctcaaataaccttatggcgccctcaaataacctcatagcgccctcaaataacctcatagcgccctctaataacctcatagcgccctccaacaacctcatggcgcccagtaataacctgatgggcatcggcagcaacttgatgacgccggccaataatctgctcagctcaagtaacaatagtgcggctgcttcagctgctgcgtccaacgtggacctgctgagcgagctgtccccgagtcccgggttcggtgccgtggacgcgctcggctcgcagctcgccgccaccacgctgcaacccacgctcactccaggcgaaacaagcccgagcccgctccaacgagccgtggagctcgccacgcaggccattctggccaccccccgcattaccagccaggcccagctggcccgcctgcaggccgcgctgggcgccgtactgtgcgccctgcccggcccactcacgctgcacaagctgtgcgccacggagccgcctgcactgcagggccccgacgtccccagctactcccgcctgctggcggcggccggccgggggctgctgccgcactggcccgcgctggaacagccgctgcggggactcttcctcgtcgaggacagcttccagctcagccacgagatactctccgtactctgtggattgctcaagactgagaacaacagcgtcacgttaaaggctctctccgacctgctggtcgcgtacgtcaagagtgacgccatactcaccgccatagtggactgcagccggccctgcgaggagcccgactactacgcgctgcagcacgcctgggagggctacgtgcagctcctggccacgctgccgcagcgcgtcgccaacagactcgagatacacacgccgaagggcttctcccacgagaactactcgtattacctgatgttccacgtcatccgagtgatggacttcatgtccgacagcagcttccaccagggcgcgcagtacaacgtcaagtgtctcgcgcacctactgtccaagatcatcaccaactactacatgagcggggactcgcccgtcatcgccaccttcgtggacatactggcgggctggaccgagacgcagggccccgaccggtacgtcaagcgcaagctcatacagacgctgctgcggcatctgtcgcggcaggccatcgagtacctgtgcgtcgtgctactccggcggtgccccatcgactacaaggcggaccagcagatcatatacaacgtcatcggggacaacttcgataccaacaacgactggagggaaatcctcagttacaagatccctttctatgtgaaacccaaagactacaaggacacgacgatacaggagaacctgctgtactacctgtcgtacaccaagcactcggagagcaacgtgagcgacctggtcctgcgcctcagtaccgtgtgggccgacgtgcggccggccaatacctgcagcctggccgagcacgtgtacatctcgcagctgctcgtcctggccgtgcgctaccgggtcaccatgtcgctgtggaccaagtccgtctggaagaccagcgacctcaagaacatattgctgcgcggcatgggcaagcacctcgacgtgctgtcgcccgagtaccgctgcgtcggcatggccaccgtcgagaccctgctgcggatcatggccgagctggacaccgacaagaaggccgagctcaagttcgagtacgaggagatgagcgacgcgtgcagggacctccagcgcaacctgtcggagctggcgcaccgctgcctcatcgagcaccgccgccgcgggccccaccaccacgtcccccgcccgctgcagctcaagcggaacctcgacttcatcgcgcgcaagttctccgacaacgagaactgcagggagcacaacacgctagtcagctgcgccgtcaaagggcccgagcagaccaaggagattgtcaaaaccatcatatctgtgaagctggacgcgctcgacgggaagcaggaggacctggactcggacgacgacctcgtgccgtacgacatggccaacgacgtgcccgccgccgccaggaagcaccccaagtacctgcgggacctcatcgagctcatcgtggacgcgctcgacgtggaactgttcgaggggagcttgcaggtcgccgagcaactcgtcaacaagcagctccgggacgaagacgttaaagtagtgatcgaactgttagacttgttcgtgcacctcgagcccaagtaccagatagacgacttcgacaatataaagttccgcacgtgcgtggccatcgtgtgcgagcggcccgaggtggcggccgagcacctctgcagggacatccacaccgacatcggacggtactccgtcgccaccaagctgttcatgctggacgtgctggccgaggccgtcaataggatagctgacgtgtactcgcagaaagacaagcccgagcccgcggcggaagtcatatgcgagccgcaggaagacttaccgcccgaggagatcatccggcggagactgatcaacaagacgcggtacttccacacgatacggccgcaccctttcgctaaagctaagaaaaatcgtttcgcggcagtgtcggattactttttcttccccctcctgggcgggttcggccaccaccagctcaccctgagccaccacacgctgaagcacgacgtggacaacatcttgctgttgaagttcctgtcggtggtggggaacgtggtgctggcgtcgaagaactgtccgcgggtgtcggtgtacagctgggaggtggtgaaggtggtgctgtacatgcggtacagcccggagcccaaggtacagacgggcgtcatgtcgctgctggccgccgtggtcatcgccgtgccgcccagcattctgaaggcggagttcttcgacgtgatgatggagctgaggtcctggctggtggactgcctgcggaacgtggacctcaccatgcggctgggcgggccgcagtccgaggccgccgtcttcgcgggacaagtgctggcgctcatggagaagacgctgggagacagcgagtga

SEQ ID NO: 196 - DNA, 5199 bp, Spodoptera frugiperda
gatacattcaaaccaatcccatacaggccatacaatttgatgagcacaatcattttgcgagtatattccgcgggttatgttaacgttcatggaggttccaaggaaaagaaccatggtggaaaccgggagccttgaggaaaggttccggttaataccaaccagcactaataccactccaaacaaggactcgaagggaaacgcgtggcaattgaaaccgggggaaaaggagaacgagaataaattaccagacccattaaatgaagatgtacagaaagggcaattctctgacacgagttcagaaccatctgaagccaaggctgaggaagtaccaagcataccttttattacactattcagatttgcatcgacaagggacaaactcttcataatctgcgcgttaatatgttccgcggtcgccgcaatatccacgccactgaacacactgttgcttgcgtacctactcgaagctatggtcaactacagcatctttggtgatgctgatgccttcatgaagtcgttactgaacttcgccatatacaacgcggcagtcggagcggcacttgtggttctgtcttacgctgccactactttgatgaacatcgctgcttataaccaagtatatgtaatacgacaagagtatttgaaagcagctctaaaccaggactttggatactttgatgttcataaaaatgcagaaatagctaacaaaatgaacagtgatataatgaagctggaagagggtatcggagagaagttagcgaccttcttcttctaccaggcttcgttcttaagcagcgtgatcatggcgctggtcaaaggatggaagcttgctctgctgtgcctcatctccttcccggtcaccatgacccttgtaggcgttgctggattgatagctgcaagtctttcaaagaaagaagctatagcgaccggtaaagcaggtgctatcgcggaggaggtgatatctgccatccggactgtgtacgccttcagtgggcaggagaaggagctcgacagatacgagggacacctcaatgatgccaggaagatcaatgttaagaagagtttgttcaacggtctggccatgggttgcctgttcttctgcatattctgcgcgtacgcactctccttctggttcggttacagactgatggtaacagatggatacgacgtttccaccatgattgctgtattcttcggtgtaatgactggttcagccaacttcggtatatcgtcgactctgatggaggtgttcggctcggcccgcggagccggcgctcacatcttcaacatgatcgacaatgtgcccaccatcaaccccctacagaaccggggcactgtgcccagtgatattgagggcaacatcgaactgaagaacgttgagttccactacccatccaggcctgatgttcctgtactaaaaggtgtgagtataaaggtgaagcgcggtcagtctgtggccctggtcggccactcaggctgcggcaagtccaccatcatacaactcatctccagattctacgacgtcgtcgaaggaagtgtcgcaatcgacggtaacgatgtccgcgacctatcagtccgttggctccgcgagcagatcggcctagtaggccaggagcccgtcctattcaacactaccgtccgggagaacattcggtatggacgtgagaatgccactaatgaggagatcgaagcctgcgccagacaagctaatgcacaccagttcatcatgaaactgccgaagggttacgacacactggtgggagagcgtggagcgtcactgtcaggtggtcagaaacaacgtatcgccattgctcgagctttggtacggaacccgaagatattgctactggatgaggctacctccgccctcgacacctcttctgaagccaaagtacagaaagcacttgataaggcacaagaaggtcgcacgacaatagtggtggctcacagactgtccacaatcaggaacgtcgatgtgatatacgtgttcaaggctggtttggtggtggaatgtggcaaccacacagaactgatggccagcaagggacactactatgatatggtgatgctgcagaacctgcctggcgtggatgagcagtcgcctgaaaaaaccaaattgtctcgcgagacttccataatcagtgaaaaagatgacgaagacgagttcttggaattccggaatgatgacaaagaagaggacgcaaccgaagctcccgacatttccttcatgagagtgttgaagctgaacaagccggagtggaagtccgtcaccctggccagcatctgttctctcatgagcggcttctgcatgccactgttcgccgtcatctttggagacttccttgcgttactcgatggcgacgatcctgacgaaattcaaaaaggagtgtcacgattggcgttgatctttgtcggcatcggtgtgttctctggcatcactaacttcattgtggtattcttctacggaatagcaggtgaagcgttgaccaagcggctgcggctgatgatgttcaggaagctgctggagatggacatcgggttctatgacgacaaggacaactccaccggagcactctgcgccagactgtctggagaggcagccgcggtccaaggggctacaggtcaaagaatcggtacagtggtacaggcagttggtacattcggcttcgctctggtactgtccctgatcttcgagtggcgagtgggtctggtggcgctgaccttcgtgcccatcatcatattcgtgctgtacaaggagggccgcatgacttacgccgctacttctggcaccgtcaaggtcatggagactagttctaagatagccgtagaagccgtggccaacgtccggacggtagcgtcgctgggtcgcgaggagacgttccgtcgcgagtactcgaagcagctccgtcctgcgctggacacggccgtgcgctcctcgcactggcgcggcctcgtgttcggcatgtcgcgcggagtcttcaacttcgtcatcgccagctcgctgtactacggcggaaccatcatcgtcaacgaaggcgtgcctttcgaacaagtcttcaagtcagctcaagccctattgatgggtgctacgtcagcggcgcaggcgtttgccttcgctcccaacttccagaagggcatcaaggcagcaggccgtgtcattgtactactgggaagacagtccaagatcactgacccagctgaacctgctgtcaaacacttcaacggtacaggagaagcaagtctgcagggcattcagttcaggtacccgacccggcctctggtgcgcgtactgaaggacctgaacctggagatacagcgcgggaagaccgtggcgctggtgggggccagcggctgcgggaagagcaccgtcatacaactgctcgagaggtactacgatcctgaagacggcattgtggctcaagacggcgtcccgctaccgaagctgaacctagtagacgctcgacgcgcgatcggcttcgtgcagcaagagccgatcctgttcgaccgcaccatcggcgagaacatcgcgtacgggaacaacgaggcgcgcgtctccaacgacgaggtcatcgaggcagcccagcaggccaacatacacaactttatcacgtcactgcctttgggttacgacacaaacatcggatctaaaggcacgcagctatcaggtggacagaagcagagagtggccatcgcgcgcgctctcatacggagacccaagatgttactgctggacgaagccaccagcgcactcgacactgagagcgaaaaggtggtacaagaagcattagataaagcgaaggcaggccgtacgtgtgtgatgatagctcatagactcagtacagtcagggacgctgacgtcatctgcgtcatccacgagggacaggtcgcagaaatggggacacataacgaactactcgaacttaaaggactgtactacaacttaaataggagaggatacgcttaagttatctatttataggtataggagtatttacttaatatagatggttagtcaaacagtctcacagcgcttggcaggctcggagatcgcagatcaccgaaaattttgaggatgcctcttgtacttctgatgtgtgtaattctgatgtactcatgtttcgatcgctgaacgtaaccccgtcatgtgtgtaaccattatgttttataaaacactgcttcgcccaagaagtcttgggttcaatttgaataaaaactttttccactataagtaagtacatacttaattacttaagccaaaaagatttggcggtgcctgtatataaaacttaacttgtataaattcagcttcgaaagctgcaataagtattttctaagaaagtataaatattaatattgggcctattaattattttataatgtctgattaagatactgttagcctaatgaaccgattatactacttattattatttacattccatatgggaaattgtatgtgaacttgtatgtttgcaaacgcacccacgacacatgaaaagatggtagtgtgggggcaacattaaaaaaaagttaagctaacagccacttaatcaacctggcctagtaatcaataagtattctaataaattgtgtattataattgtattaattaagctaaaaattactttgagacatattttatttaatcttttataagtaagctgcgaacacttgaataaaatcaacacttaaagaaatagacaaaggacagtattaggatattatggcatttaatacttataatgatgtttaatgtgatataaaaagaactacactacctacgtatatagttacctaccatattttgtttttaagttatatattttaagtaaaagtgatgtgcctaggatgcctttaatgtagttacctacctatgtcggtactgtattacaatgatacctaagaaataataatagaaattaaaacaattacattcttatttaatgtgttttatacaaacttatatgtagatttataaaattataaaaatctttacaagattacattaagcatggttaataatttaataaaaaaatattgtgcctattgtggttaatgtgcctctactttactgaatcaaattaaatctagatcacagtaattaagctaaagcaaccagtgataatgattaagatttgtttatttttgtaatttatttatgaccataggaaataaaattatattttttgttataaaaaa

SEQ ID NO: 197 - DNA, 2431 bp, Spodoptera frugiperda
atggtgtttagtcaatataaatatgacacgagaattgaactcattgtcaataatgaaacagaacaggtcatggatttctacgaggagacggagctatatcacggctaccccactcgagtgcatgtctccacaaacgagacacttaccgtcgacaacccaatctttgtgaccgctactcagcagaagggagtatcatcatgggagctcccgctactggtgcagacacagagcggagcgctgatattctccagcatggcgcggactctctgtccgcacgacgccggaccagatataaagacggagaaccggccgatgatccagatcaccacgtccaaccctcggaacgtgtcggtggacatcaagttgcggcgcgtcaccgacttctacgtcgacgttaataaggagatatcgctgaacgtgaccccaagctctccgaagtacttctacttctcattcgaccagcatccgtggaacatcaccggcggacacatgcagaagagcgccggagttgtgacacaaagattcaactatactataccgaagagtgtgatcctcatcatagaatctgatgacgacatctgcgctaccgtctccatacagaataactcgtgtccagtgttcgacagtgagaaggaagtgctctacaagggctaccacctcaccatgatgagcaagggaggcatcacgctcacgcaatcgatgttcccggcggggttctacatcgtgttcatagtgaaggagagcgaccagcagtgcaccggctccagcggccccccccacgccgtcgctgatggcaaccgcatgaagaacttccggttccgcgtgatagccacaatctcgtaccgcgagtacgtggtgggggcgctggtgacgctggcgctggtggcggtggtggcgctgctcgtcgtgctcgccgtgctcgcctgcacctgccgatgcactgaaacagtagtgatagtggagtcggagcccatagcgcatgcgtcgacgtcgggcgaggggagcggcgccggcgcagccgataccgcgcccatactgcaggatagtgatgatgatgaaatcggaatcgcggacgacaagtggtctcactcgcacccgctgacggtgcagaagctgacgcgggccccgctggagacgcaggccaggaggtccgacagatacttctggggcgcgctgacggtggccgtggtatacgcgttgcccgtcgtacaactactgttcacataccagaggatggtattccagacgggcgaccaggacctgtgctactacaacttcctgtgcgcgcacccgctggggttcctgtcggacttcaaccacgtgtactccaacgtgggctacgtggtgctggggctggtcttcatggcccaggtccgccaccgccagctcaggaaccgggggaagccgcaggacatgggcgtcccgcagcactacgggctgctgtactccatggggctggcgctggtgatggaggggctgctgtccggctgctaccatctctgtcccaacaagatgaacttccagttcgactcgtcgttcatgtacgtgatagcggtgctggtgatggtgaagctgtaccagaaccggcactccgacctcgtgccctccgcgcactccaccttcatggtgctcgccgtcgtcatgaccataggcctgttcggcatcctgtacccgagcgcggcgttctcggcgctgttcacggtgctgcacctgctcaccgtctccatcctcacgctcaagatctactacgccggcaggttcaaacttgaatggtcagcgtgcgcccgcgcctttcgcgcggtccggtcgcggcggctgcgggcgctgcgccccgcgcacacggcgcgcgccgcgctgctggcgctcgcattcctcgccaactgggccttcgccatctacagcgcggtggtccaaaacaaggacttcgcccgccagctgctggccatcctgatgggcaacgcgatcctgtacacgctgttctacgtggcgctgaagctgctgcaccgcgagcgcctcgcgccctacacctggatgtacgggctgctggctcatgctgcatggttcgccgcgctcaggctcttcctggattccaagactaagtggtcggaaactccggcgcagtctcggcgccacaacgcgcagtgctcggtactgcagctgtacgactcgcacgacgcctggcacctgctgtccgccgccgccatgttcctgtccttcaacatgctgctgactatagacgacctggtcgccgacgtgcacagggacagtctgcacaccttctaggtatactgtgcacagggacaatctacacaccctctaggtaccatgtgcacaaggacagtctctaggtaccacgtgcacagggacagtctctaggtaccacgtgcacagggacagtctctaggtaccacgtgcacagggacagtctcta

SEQ ID NO: 198 - DNA, 9746 bp, Spodoptera frugiperda
ttttgacgtttcgatttgacaaattcactgataaatcaatcgtgtttgtaaaaatatctcgttttgttcgcttgtttggctcacaaatggggttttccctgaagaattttaaatttaatcgacattagtgcttagaatacttagtaaatgactcaattccaccataatacagttcagtgccggtaaatcggatcatggcggtcctaggatggatgaaattcgtatttttgttcagctttccttatttgtgtttgcaagaaacaataaacaaaggaggaataatattccactataataatacatataaatatgatgtaccatacacggtggctgtcaataaaagcacggaatacatactggagtttggaggggagcttgaagcgtacgatactccagcgagagtgacagttgcaagcgacttcgctaataaaacatatccgctgttcatcactgctaggcaacagaaaggagtattctcctggcaactgccaatgatagttcagactccggtcagcctggaacagttcaccaacatatcccgcacgctctgcccacataacaacatgtttactgaggatgaagatacttgtgacgtttcaacccagaacacaccaatcatccacctaacctcttcatcaccggattccataaacgtaaccatattggttgagaccgtccaagactttttcgtcaggttgaactcaaccaccaatctaacaattacgccaagtcaaccaatgtactacttctttccattcgaccaatcgaataatttagatttgagctaccaacatgcgaaaaggaagtatttgtgtaatcaaatggatgaaaatgaaggttcgagtttccataggtaccttttaaggtctaattttgagactagaagctggatgtctagacctaaaagcgtcattgtcatgattgaatctgatgacgatatatgtgctgtcgtttctatacagaatttttcgtgtccagttttcgataacgagagagatatcctctatgatgggtattatttaactatgacgaggagaggagggatcacgctaactcaagacacattcccagtagggttttacatagtattcatagtgaagacgtctgatgaggattgcacggagaaaggtggcaatgccaccctcccccacgtcgcgcagtacctgggctggtctcaggaggagcaggtgcaggtggtcaccaacgacggcagagtgaagaccttcagtttcagaataatacaaacgatatcgtaccaggagtatgcgatagcggcgggcgcggcgctggcattcttcggctcgttctacgtggccttcgtcatagccgtcctgtgtcgcaagcggatacagcgcactgccgaacttagcgaagaagaaggccacctcacccccccaatagtcccccacgacgcggggaacatagcgccggccgcgacaaggcgacgccacgtccacgtcgcagacaccagcggggagagcacctcgcggcagtgtctcgtgggggagggggacatctatacttctacacggacagatggcagctcgtcatccgacacagaatccgacttctcgacactagacgatgtgaataccgacaaggatatataccggctcggaggaaaactgtgtgtcgccaacctggctagatgtcgtccccgcgtcctctcggcccggtccaagatgtatctgtggaacgtactcacagtggcagtgttctacaccctgccggtcatacaactagttgttacctaccaacggctcctcaaccaatcagggaaccaggacttgtgttacttcaacttcctgtgcgcgcaccccctactagtattgtccgacttcaaccacgtgtattcgaacctgggatatgtgttacttgggctgttgttcctagctcaagtctggaggagacataatacgcatcagaataaaactgctgaacagaaggaactaggtatacctcagcactttggccttctctacgcgatgggtatagccctggtcagcgagggtctactgtccgcagcctaccacgtctgtcccaatagcatgaacttccaattcgacacgtcgttcatgtacgtgacgtcagtgctgtgcatggtgaagatctaccagtcgcgccaccccgacatcaatgcgcgcgcgcacgccaccttcggggtactcgcgctcattatatttattggtctcgtcggcgtgctgaacgcgaacttctacttctggatcgcgttcacggtgctgcacctcgtcacctgcctcgtgatgaccttccagatctactacctcgggagatttaagctagacggcgggctggtatgtcgcgcggcccgcgagctagtgtcgcgccccctggccgccatcacccccacccactgcggccggtgcgtactgctcatcattgccaacctgtccaactgggctattgctgcttatggagtggcccaacacagtcgagacttcgcgtcccatctcctcctagtactcatgagtaacctcttcctctacacattgttctacatcgtcatgaagttgctcaaccgggagtcgatccggtggtacagctgggtgttcatagcgctgacatactcgatatggttcggatccagttatttctacttagaccagaatactaattgggcccttactccagcgcagtctcgccaaagcaaccgccaatgctccctactccaattatacgactctcacgacatctggcacttcctgtcgtcaacggcaatgttcttctcgttcaacatgtatttaaccatagacgacaacctctctagaacgcctagaagcaatattatggtgttttaatttttaaaatttaaagaaatgtgttttatgtggtccaattcttcctccccctttgtaattgtctagtctactgataattatccagtcctccaatcccgcaattacaaaatccccgaccctaatccctctatgtgtttccccccctaccccgtatccctcaatccccaaatgaaatgaacttaatttattcaaattcatttcatttcattgatcttctgatccccggatccagatatcttctatgggggtgggtaatccaacccccctccccttaattgttcgatccccaatccctcaatagaaaattttatcgaggcttattttttatttttgtgaatgataaattattattttaatgcatgattatttttgtaaaagaaaatttatttaattttaattgataatgttgtaataattttatgtgttgtattgattatgtgattttgtgaggtttttaaaacgggttattctagatttaggttaaccccctattaccccttattacatgggactcataacataactggtgaaaagtgggtgttacattgtacagctctgtaccccccccccttttagtaattttaacgaaatttaaattacatatctttgtatatatatatttatatttaattggtataataattattaaaaaaaaaaaaacatttaaaaatataaaaagcagtagcccaccagtaacgggataaatctaagctatccggagctgcggactacctagcgggtttaccggggctccggctcgacaagcaggagtaggaacggggtggtttttagtcagtaagagtctgacactccctctcgcctcgcccgacgcgagagaagtcattggatgatttcccccctcaaaaaaagcggtcagggctcaagagagaggaatctccggacaatacgcgccgtgtccagaagtactgccttctgcatcaggctcttgatccaaccatctaacgttagcctactcaggtgttggtcgaggcttttggctataaggccattggcagatacgactatcggcacaatgattgctgaatctacatcccacatgtcgacaacctcatgagctaaatcaagatatttactggcttattcttataataactatcgtgaaacatactaaattaactaaaaatcacggtttactcacatacattaatggtgaaaagctctactagtttcaagtgtgggagagccatgcttcggccctgctgggccggctcgaccggagtgataccacggccgagcagaaaactgacgtgaaacaacgcttgcgttgtgtttcgttgtgtgagtgaggttaccgaaggcccaattccccccttcctaatcttccccatccccgattcccgaacaactacccttaaattcctaactcccaaaaagccggcatcgcacttgtaacgcctctggtgtttcaagtgtccatgggcggcggcgattgcttaccatcaggtaatacgtctgctcgattaccctcgggtttcataaaaaaaaagtcacggagggactcttcattatgagcagcgtgcgtagctagtaagggtcaatttatacaagcgcagagtcgaagcgcatcgaagcgtctgtccataacagaacataacaaattcaatcttaactccacagcgtaacgcacacattacttcggagattttaaaaggcgcgtattcgtcggaattcgcgcgtttgcgcgcgaacaatgcttcggctctgcgctagtataaattgatccttacgctgtcgagttaaggttgaatttgaccctaagccttttcggtgaaactagtagagcttttctccattaatttacgtgagtaaaccgtgatttttagttatatttactggctttatctttttcagctttcacgagattctcgtcatgtgagattgtaaagattactcaaattcaagtcaaaatcatttatttcaaatagaccaggaaggcacttttgaacgtcaaagcaaatataataatattaataacgtctatctgtcggttagtcctctagttgctctatttgctcgttccaaagtgtagattcctatggagaagaacgagcaagaaactccataggttactcttatctgttaaactaaacgattattaaaaaaaaagtaatttctttaattctaactatacattgtctttacccttagtatgagtttgctttacgttgaaacgaaaacgaaacgagagcgcgttccgtgctgtgattggctggcgcaaattaaaggtaagcgtcaacaggcccatatcccacgcatcgcacgcaacggattttagtttgtcttgtatagaaactcatacaactgcgtccactgatccgcatcgtacggaccgcatcatcggcaatgtctacatgcgatgcgtactgatgacgtcatacggaatgcgtgcgatgcgtacgatgcgggcttgtggacgcttagttttaccaactaatcagagcgccgctctcgtttcgatctcgcacgtaaaacaatctcatagtacggccttatttgccacagacgtcggttacccatccaaaatacggccgcggtaagcaatgtcttaattttctttcatccatgacattagttagtgctcaaaaaagtattacatcgaacaaatgaggtagtgtttaaatattgtctaaataatttagtgtttctgtctacctactagagttgaaggcgtgatgttttaaattttgctcaattcggtagtttcctaggtcaaaaaataatttacaatgcaataaaatatcccaaaataaacgagaaaagctcaaccagtttcgagtcacagagggactctcggtgatgtcgtaccctaatgtacgtgaataaaccgtgattttttagtttatttcgtactttcttgcattaatttgattatacttatttctttacctttctagaaattttttgagttattagtatttgacacgaacattttatgtcgtcataacttgcgatctcctacaaaatccatagaaaagtatagtttttgacatttcgataaacgtattgaatatgactagtaggaaactaccgtatttcattagaaaaaatgtaatttaactctgaattattaaaatttaactcttatgaaatttgtaagttgtttaattttagtttctttataggaaaattcatttgaattgtatatttattattttaattttgataatagggtagatgactaatttttattttaatgtccgtcttgtagattattttaaaacattagacacgtatttttattttcttacgcaaacaaatacttttgaagatatatcgatttgaaatatcgcgtgacgtcacttctaggtacattttatacgtagaaatgacgtacactcctaaactttgaatcgttttatctaagtattgttatcttatttgacaaaaataaaaaaatacgtgtctaatatttttccatttacctaactgacggactaaattgatttttaattttcatatcccgtcatcatccctattgtaaatataatattttgaattatatttttaatgtttgttatttacttatgtttaagtaaatgttcttatatacgtgtatatgactattgtatatagttattacatagtgtgtgcaaaatttaagagaaatatgagatttactatggcgtctgaaaatttagatccatttttttaaaattaatagttaaaaatactaaaaacttgcttttaatcagaagaaatgggcatatagggtgactgataattagtgaacgatatttaaacacgtgattgtactcatgattacaaacaactttcccaaagaaactttttttgtatactcattagttttatttttatcacaataacaaaacaacaaaatttgtgatcgtgctttagcatgatcagctgttagcagcgaggcgcccgcgttatcggaagactagtaactaggtaggtattttggaattttagctgctaacagctgatcatgcaaaatcagactttggctcttttttcagtcagcctagtaaatatatgtacctctgtgtatcttgtcggcaataagacgcgtgatgatatgttgataagtgaagtaaaagaatttttaactataatctttaaatatttaatttttaatgtttacacaaggttagtaaaaacgcaggatttattctaagattatttagacaccaatgacaaacggtgaaggaaaacattgtgaggaaacctgggcttataatttctaattataagtttgaaatcgccaacccgcattgagcaagcgtgttgataaatgctcaaactttctccgtgtgagatgaggcctttggtcagcagtggacacttataggctgttggtgggataatatatcaaattccatacaattatttaaaaaaatatactaaattttcacgcgttaaagctatgtttcggcactgctgtgtcggctcgaccggagtgataccacggcctcaactaacctatagattttttccaatatttcttgcgtttttgtctaaccttgttgaatttataaataattccaatattatataagcttcccaacacggcttagatatagtctttatacaccaaagcttattaaattaaataattatattgatctgtttcgaccagatatatggatgtgatggaagctaaagaagtatgtaaggagcgtagtaggtggcgctctgtagtttctgtataccatgggacaaagagaggattttgagtatgtgtgtttcaattagagaaatgaggtgctatttggtatttaaagttaaaattttaaattgttgcttaaagcttgttgaaaagattttcagaattttaagtagttttgttgcacagagtgtggaattgtgtatagaaatacattgtatagctgcacctctgcctacccctaatctattagacaccttaattaggaattgtgtataaagtagttagaaaaattcaaaatgttcctatcataagaaaaaaaacaattatttttaagtaatttgattcataaagatttaattaattaaaacatagattataaaataaataaaaatattgattgtattcttacattaataacatttgtcattaaatagaataaacggcgttgcactatgtcgctcattgtcacatttataagccccgcactcatattgaaatttgttgagcttcctcgaacacttatgggaatgatccgtttaacctaatctagtatctaccgtacagttataaggtcaagaaaccaaatgatggtcgaccgtcaactttatcggtgtatacagggtgaccggtaattagtgaacgatatttaaacacgtgattgtactcatgattataaactactttcccaaagatactttttttttatacaataacaaaacaacaaaatttcattagcacgcgcgggtaaagtccaaaatacctagttactaatcttccgataactcgggcgcgggcgcctcgctgctaatatgttttgtttgttattgtgataaaaataaaaccaatgagtatacaaaaaaagtttttttgggaatgttgtttgtaatcatgagtacaatcacgtgtttaaatatcgttcactaattaccagccaccctattttctcgtatgttatttgtcacttaaaaaagtgatttcatctcgaactcttaacaatcgatctcttagttgtatgaatctatatctgaagcagtttctaagctgaaatagttgtaattcttgcacttactaccatattcagagacatttaatgattacttaaactattcagagaatcacagatggggcccagtaaggcagatgcctgatccggagctgcggactacctagcgggtttaccggggctccggctcgaagggcagaagtaagaacggggtggtttttaatcagtaagagtttgacactccctctcgcctcgcccaaggcggaagaggtcattggatgatttttcaccccttaaaaaattgttccttagcaacgattttgttccgaaaactaatgctaaggactgggttaagtaactattaaatgactctgagtactgccgttagaatataagtaataaaatgtattttttaaataatgtaagggtgtttcttcgaacaaaatgacatgttaatttttttctagtttttaaaattaaattgattagtaaattaaaattaatattcttaatggattacttgagaacatattaaactaaaattcgcggcttcgctcgcgtttcagtaggataaaatgtaacctatgtgttattccagaccataatctacccctgttccaaattccataccgatccctttagcagttttgacttgattgagtgacaagcatacacacaaacttgagcatttataatattagttaaaattaactttacattaatgatgtgcaatttttttcgaagaaacatccataaaggatttgaaccacttttcaattttgcaaattagctacatagcacatctctggtgggaaagcacccgtaaggtaagcgtccacgggcccgcatcgtacgcatcgcacgcaacggattttagtttgtcttgtatagaaactcatacaactgcgtccactgatccgcatcgtacggaccgcatcatcggcaatgtctacatgcgatgcgtactgatgacgtcatacggaatgccgatgccaaaaatccgagtgaaagtggcattggcaatccgattgctgatactcgcgtcggcaatccgatcgctgctgatacagtggacgtagtctgaaatattaatccgtttgatgcgatccgtccgatgcgtgcgatgcgggcctgtggacgcttaccttgagccgtgtgtcgacccgtatgtaacatagtcacgccatctatcgctagtgtagtgaacaagtttaagactgtcgtcatttcttcgtattgttatgaaattgtaaataaatattgctttttgtatata

SEQ ID NO: 199 - DNA, 8154 bp, Spodoptera frugiperda
aagataggatttgcgaggagagaagggaggaataagtgcttaacttcaggtttattttcctagaattttcttatcaaatcaaatagggtattccaggcatatgcactggagttttggagtctagttttcatttttcattctacacaaatattttgtagtgtgttgattgtgatagtgtagtggtagtgcttcgaaataaaatgcatcggttacttctattttcggttctgattttgctgacatgttggtcagttaatgcacagaacaaatatacacctatttacaaaaatttcacttatggatcaaataatacaatgaatgctaatcaatatctggaatatattttggaattctcgaaagattatgacgacccagaaatttacttgcctccaagaatttggattcaaagtgatgcagatgttaccgcccccttgatgattgtagcaagacagaaaaaagaaatgatttcttggcagctgcccctagaaatagaaggcacaaatggcgaaacaaatgaaaattatacatctagaactatgtgccatgatattattaaacaatatagatttgcaggaagtaaacagaaattaaaacaagagaatgtcattgtttctgttactacctcatcagtaaccaatgtaagcttcactataagggtagacaatcaaaaggattttactctggaattaaataaagaaatagagtttgacattactccaagcggaccaagatactttttctacaatttcactagcaatgatacgttgttgagcaaaggagactccaattatgaaaccgtaattctggaagtgacctcagaggatgacatttgcatgactgtcagtatacaaaacatcagttgtccagtgtttgatacaaaccaagatgttacttttagaggcttttacgaaactgttaatagaaaaggagggatgaatataccgaaatataaattccctcatggattttatgtcgtctttgtagctaagcctgatgattatgcctgtgataagggttccggaaatttagacgccgttacaaatccagatcgactgaaaagcattaagttagtaattaagccaagtattacctactctgattatgtcaaagctgtgctttttactttgggatctgtaggagcattttacataatattcggacttccgtacttcatatactcggtgaaaaaatctctgcctagggaaatggcgtatgttgatggtaacttcccaacaactcccagtgcaatttctcttttatacgcagaaatgacctccgtacagcgcaccgtttcggccgttagtggcccttcagtggacatggccgacttcgataccttggccgaggtggacaccgatagggacctgaggttgggtaggggagagccttatttggtggatttggcgaggaagcatcccaaagagttgacgaggaaatcgtatttgtatctgtacaatgttgtcaccgttgccattttctacgctttaccagtgatacagttggtcatcacttatcaaagggttttgaatgagacgggccaacaagacttgtgttattacaatttcttatgtgcacatccattaggtgtactgggagatttcaaccacgtgttttcgaacataggatatgtcctattgggagttctattcctaataattacctacttaagagaactttcgcacaaagacgatgatttcgaccggcaatttggcattccccaacattatggattgttttacgccatgggtgtggccttgatcatggagggtgttttgagcgcaagttaccatgtctgtcccaacttcttgaacttccaatttgattcgagctttatgtacgtcatggcagtgcttgttatggtaaagttgtaccaaaatcgacatccagatataaacgccaacgcttacactacatttggagtactagcagttgctgtcgtcttagctatgattggactactcgaaggaaatgtctatttttggacaatattcgtgattatgcacatcctgatgtgcttctacttaagcgttaaggtctactacatgggatgctggagtgtgcgagatatatcgatgcagaagttccgtcaagtttggatctacgatttttggtctggaccagtaaatgtcataaaaccgtgccataaagctagattcgtgcttctcttcttgggcaacttgtgcaattggggcttggctatcttcgccatctataaacttcctaagaactttccagtcttccttttggctatatttatggccaatactctcctctatttcgtcttctatatcgtcatgaagtacattaacaaagaacatgtaagaattttaacgtggatcttcctttttatgtcaacgttgtgtgcagtatctgccatgtggttcttcttacataaagcaatatcttggaagaaaacggcggcacaatcgagacaattcaacgtagaatgcaagctgttccatttctacgactcccatgacatttggcactttctaagtgctacagggatgtttttcacgttcatggtgttactaacactcgatgacgacttatcgcatacgcaccattcgcaaattccagtattttagagcatctacggatgaaaaactagtctgaaagtatttttattgatatgagtatatgaacatataaaggttgccttaaaggttacatcgaagtcgtgcaggaagttaaactgtttttgtaccctctactactatattttacagctcccggaacgaaccatggccggtgacaaacgctgtcgtcggtcgtacacccacttaatctttacgcagacagggtttctatgaccagccatggttcgctccgggagccgtagtcttctttcggtcttgtgtcgtttcaggcattggcagattccgtaatatcaaactacaacactcttcagctacagctataataaattttattgttaattgtgctatctttactggttatattggtcagatgttggtgtcttagttatttttcgtcggcgtatcgtataagatgaaacatattccattctagaacgaccagttaataaccatggtgtaaacttaccactaaaaattccaatatcaacatctcgccatgattttgggagataatttttttatactttttatttagtagatatacaattgcattattatacaaaaataaccaatttttatacagttattaatgaataaaaagtaggatattcgcccaaatccggttcagataggtgtacagtacgtccaggatagcagtagacgtgagctatttataagttcagttaatatgaattctttgtactgaaaaaataatcaagctgttttgatcaaactataatttccgtatactttgagtaatcctaaaatatgtcttaaaatgttttaagtaaatattattcaaatattttagtaaaaaatataaatcttttaagaacatagtagggcaaattgtctcgacccgtctcacagtggttccaaatgccgaaaacgttgtcatgaacctttaagcgtatattgttcatccacttcggaattactttcgtacttaatggtttttggcatcgctgattacgaatctgacattattttttttttaacaaaatggcgggtcccacatggcggatataaattgaaaatatcaatcaaaacgcaaagcttcttatcaaatttggtagtttaaggtcgctgattacaaatctgacattatttttttgaaaaatagaataacggatccaatatggctgaaagaaattcaaaaattccattttaaacgcatatttttttgaaattcttttattataagggacttttgaaattgctgattactaatacattttctttttgaagtacaatattcataacctattacttatgtacagctgcccatagatactcaatgcgtcatttcacacttttgtattcaaacaactcccagcaatgcataggcagttaaaggcagctaaaccaatgtggttctgtatcttctgactgtacattttgagattaatcgcattaataacattaatcgcagaattatgcagaattaagtactttttgaatgtatttttacgaaattttgaatattttaagtatattaatttttatgcaattaacaaattttatgcatttattgttattaaatctttagtcaacttttatcttacattaatacgtaattgaaaaagaagaatctgctttacagcaataaaattgataaactacaaaacgttttacagcgttttcaatatacgcgttctttttcactgccgaccaaaataacgtagtacatgggtcacttgtccctgagctatgaataagaatagatccggtctaatccgtatatctgcgtatcatacgacacgagcagtaaacatgaaaatcgctaaatagggactttttattttacattataaccacgttttcagcatttggaacaactgtgcgtctgtactattagccatgaaaatgtgaatgtaatcggtaataaaattattgtgatttgcacatttcgtcgtcttatgtcatgtttttccattaaaagttttcgattattttctattttcgttttccaacagaatctgatattcctaattttcaaacacgtattttctttgcctagaccggttttgatatatggagctgaaacgtggaccccatctcaaagtgatgagagacttcttggtatttttgagagaaaaattcttagaaagatttttggggcagtaaatgaaaatgggctatggcgtcgaagatacaactttgaactgtatcagttatacaccgatccagatattgtgaaattcgttaaagtgcagagacttagatgggctggacacattgctaggatgtcagatcaggaggagattagggcccgttctcatgacaggcgcttaacgctcgatttaaggcgcttaacgcgcgatctcaagtaaaatgtatgtagttgtaatcgcgtgttatcaaaacgcgcaataagcgcctgtcatgagaacggggcctaatgcacgaggagattaacattttcaaaatcagagggcacaagaagtagaggaaaccacgcaacggattgtcgagccacttatgatgatgatgaattcattcaaaaaaaatcgtaagccaaaggaaacatttttaacagcttttccattgtgcgctttaagccagtggttcttatgataaataattttatacctccaatttgcagaaaattaacaattttttttaatttcatattttttcataataatcatgtaatttaattaataatattagcgtttgtaaccctcccagcgaatagatcttgttttaaactatttcatacaataattcagaaatatgaaatgacataaatatggtgactgtccacagttaatattttctgaaaatatctaaatttcgaagtcatcctactgtgacgcgcaccggtatttttttttacttttactatacatccaaacacaatcaatttttgatattctatatttttaaagtaaaatgtaaaatcaccccctttactccactaaatggatcaaaatacacaataatgtacaaagtttccttaaccattttgctacaatttggagacattcaagttttttatatgtatggttaaacatattttttaaagagaaagtgaatgactgcgatcggtttggattcagagccggcatgggaacgagagagccatctttaatttattagttctagtccaaaaatgctacgaccaacaaaaatatatattttatatgcttcacaaactttgaaaaagcatttgacagcgtaaggcacgacctactattagaatgtgtgcacggtttagatgggaatgacaccaaactacttaaaaacttgtactggaaccaaaacgccaaagttagaagggagttagacaaggatgtgttctgtcacccctgctatttaatctttacttcaagtttctgtttaaaggggcactggaggtcagaaaatttactaaaatttaaattaaagctggagggtcaaatactagaacaagtgacgaagtttaaatatctaggcctcacaatatctagctacggaaagtcgaaacagagccgcaagttgcctgaatgaaacagtatggagaaataaaaatatcagaaaagaaatgaaaggcagaaagccctgacacacagaggacaaaatcaaaaagaatgctagaaacaacagagataaaaatccttcgaaaaatcgatggtaagtcgctatggggcagagacgtacagatatacgacggagatccaaggtggagaaaattaataactgggtaagaaacacaagagtagaatggaatgactacacaggccgaataacaacagagtagtaaggacagcgagaggcaattccccaatgagaagatgatcagtgggaagaccaaaaaatcgatggaacaacaacttagtgaggcacattgaaaaaacagacagccatgactacacaaaaagtagaagaagagaagaaattgggcgtctaattcattttacacccaattgattcatttaaaaaaaaatcgagacacgaatcttctaacaactttttgtgcggtttccactttgctccatactacatggcattttcgcggcaaatttgaacaagcatttggtaataaattacattatttttattgaaaaacttcttttagttaagactgtacactgttttgagttgcacactatttttgtaccgaaccttttaataattactcagcaaataatttagataaaaaaatgttctttccctaaattatagcaaaatggttgttcgtcttacactaaaggcaaagttatcggttataactgctaaatcctaatcctacgcctctcatcgtatgcgtggtggttcgcgctacctcgtattgttgctccatagcgttaaacatctcgtcttgtttcttgaggacctccgtcgtggaattgctgccttcgcttggcgtttttatgcccatcaatctcttaaatttattggctactttaccgtctgtgtcctgtgcaaaagtggtcgcctcccacaacttagtagaccttggggcgttcgcttggagctttggattgtggataggcactgcgggtccagcctgttctggttccggatctttcttttgccataacattttacgtttttcgatctggtctctaaaacgcccggtaataccaggcatgaaaaatctatctttgttttgggtactgtcgccttcttgaggagtttgagtagcggttttcggatcaaatcctggtttgtttattctgcctcctctatcaaatctcctttggaaacctcctctgccaggtctctctctcgatcttgaacgtctcggagatctgctacgccttctatctctatctctagacctgcttcttcttctatctctgtctgatctgtatctatcatctcgactatgtctatctcttcgatcatccctcctatctctcgatctgtcatcatctcgacttctagatctatctctccctctatcgtcatctttacttcttctatcatccttgtcatcacgatgtctcgatctatcgtcgtctttgtcatcacgatgtctcgatttatcatcatctttgtcatcgcgatgtctcgatctatcaacatctttgtcatcgcgatgtctcgatttatcatcatctttgtcatcacgatgtctcgatctatcatcatctttgtcatcacgatatctcgatctatcgtcatctctgtacctgctggatcgatcgtcgttcctatctcttccgctgtatctatccctttctgacctatcatctctcctatctttatctctcgagtctctgcttcctctgggactggagcgtttatcgtccctatctcggtctctatacttggacgacgatctcatttcagcatcagagtcctcgctgcagctcatctggacttcgtcatagttggtgtcatcggtttgctgggcacttgtgggcttcctgaagtttctggcgctgccaccgtagggatccacagaggcttcatcggcaacatcatccagatcatcatcactaccattaccataattcatgagtgaattcatttttgattaataaaagcttaaattatctaaattatgaatttttcacactgcttttcttccttccaacttccaatcagtcggtcattttgtttt

SEQ ID NO: 200 - DNA, 2267 bp, Spodoptera frugiperda
gttgaccttataaaagccacaattttcagtgattgtctgaaagtgaaggtgcgatgttgtttacgtaaattagaaaaagaaaacacaattaaaaaatatgttcaggataattttcagcagtttgttaatctcaacagtgctatgtgtgtaccaaaacaccagtggactgaataaaagaaactttatttacgatacatataaatatgacacgagaattgaactcattgtcaataatgaaacagaacaggtcatggatttctacgaggagacggagctatatcacggctaccccactcgagtgcatgtctccacaaacgagacacttaccgtcgacaacccaatctttgtgaccgctactcagcagaagggagtatcatcatgggagctcccgctactggtgcagacacagagcggagcgctgatattctccagcatggcgcggactctctgtccgcacgacgccggaccagatataaagacggagaaccggccgatgatccagatcaccacgtccaaccctcggaacgtgtcggtggacatcaagttgcggcgcgtcaccgacttctacgtcgacgttaataaggagatatcgctgaacgtgaccccaagctctccgaagtacttctacttctcattcgaccagcatccgtggaacatcaccggcggacacatgcagaagagcgccggagttgtgacacaaagattcaactatactataccgaagagtgtgatcctcatcatagaatctgatgacgacatctgcgctaccgtctccatacagaataactcgtgtccagtgttcgacagtgagaaggaagtgctctacaagggctaccacctcaccatgatgagcaagggaggcatcacgctcacgcaatcgatgttcccggcggggttctacatcgtgttcatagtgaaggagagcgaccagcagtgcaccggctccagcggccccccccacgccgtcgctgatggcaaccgcatgaagaacttccggttccgcgtgatagccacaatctcgtaccgcgagtacgtggtgggggcgctggtgacgctggcgctggtggcggtggtggcgctgctcgtcgtgctcgccgtgctcgcctgcacctgccgatgcactgaaacagtagtgatagtggagtcggagcccatagcgcatgcgtcgacgtcgggcgaggggagcggcgccggcgcagccgataccgcgcccatactgcaggatagtgatgatgatgaaatcggaatcgcggacgacaagtggtctcactcgcacccgctgacggtgcagaagctgacgcgggccccgctggagacgcaggccaggaggtccgacagatacttctggggcgcgctgacggtggccgtggtatacgcgttgcccgtcgtacaactactgttcacataccagaggatggtattccagacgggcgaccaggacctgtgctactacaacttcctgtgcgcgcacccgctggggttcctgtcggacttcaaccacgtgtactccaacgtgggctacgtggtgctggggctggtcttcatggcccaggtccgccaccgccagctcaggaaccgggggaagccgcaggcctgttcggcatcctgtacccgagcgcggcgttctcggcgctgttcacggtgctgcacctgctcaccgtctccatcctcacgctcaagatctactacgccggcaggttcaaacttgaatggtcagcgtgcgcccgcgcctttcgcgcggtccggtcgcggcggctgcgggcgctgcgccccgcgcacacggcgcgcgccgcgctgctggcgctcgcattcctcgccaactgggccttcgccatctacagcgcggtggtccaaaacaaggacttcgcccgccagctgctggccatcctgatgggcaacgcgatcctgtacacgctgttctacgtggcgctgaagctgctgcaccgcgagcgcctcgcgccctacacctggatgtacgggctgctggctcatgctgcatggttcgccgcgctcaggctcttcctggattccaagactaagtggtcggaaactccggcgcagtctcggcgccacaacgcgcagtgctcggtactgcagctgtacgactcgcacgacgcctggcacctgctgtccgccgccgccatgttcctgtccttcaacatgctgctgactatagacgacctggtcgccgacgtgcacagggacagtctgcacaccttctaggtatactgtacacaccgccatgttcctgtccttcaacatgctgc

SEQ ID NO: 201 - DNA, 4206 bp, Spodoptera frugiperda
tgtagttaattcactcggctacatctaagcttagagtctctgacttgagaacgtctctcaacatctggtcccgacatatgctcacgttcgaggagacgcacgagctggtggtgaacgcgtccgtggagtttatcttgaagttcgtaccgaccccagcgcaaggagtgtggccaataagggtttggatccaaacagacggtggcgatacgtctcgaccgctgcttgtcaccgcgaggcgaagaataggcgcgtggacgtggcagctgccgtaccgctcgggcagctcgctgctgtaccagctggagcgcacgctgtgtccggacgacagcgtcgacgtcgaggaactcgatgagaactgtgaatcggacgatccaacccagtcatctacgagagagttttccctgcacgtgggctcgtcgtgcacggcgccgtcccgcgtgcagctgcgcgcgtccttcgtgcgcgactggcgcctgccctttaggtcctccaccactctggtcacgcaacagggagcgccgcgcgtgcacatgtaccagttcctgccggagcagagcagcgtgcgcgtcgtcgtggaggccgacgacgacgtctgcgccaccatagcagtgcagaactacacgtgcccgatcgcagaaactctggacgacatcgaaatatcaagtctgcggatgactgtgctgaggtccggcgcgatgcagctctcgcggagccggtacccgcgcggcttctacgtggtggccgtcgtgcacgactcggactccgcgtgccgcgaggaagaccccgccgaggtggactggctgtgggaggccgccgtgctgcagcagcaacaggagcacgccgacgccgcgccgccgcgccgcaagacgctcactctgcacgtgcaggcgtcgctgtcgcgcgagcagtacgcgctgggcgcgagcgtgtcgctggcggtgttcgtgctgttctacctgctgttcggcgggctggtgctggcgcagcgcctgccgcgctggaagcagctcgtgggcccgcgcgccgtgctcgcgcgcaagccggaggaaggtacgagatctgagatggacagcactgcatcgctgtcaccccgacgccgacgacgccgcgattcaactgcgacgttcgacagcagcgacaacagcgacacggacgaggaggagacggcgaccggcaccaccgtcgtcaccgccaccactcccccacctgccgggggcggcgccaccgtcgcgggggaccacagggtggcagtggccagtgtgggcaccgaccccgcgccccctgcgacccccgtcggtgacgtcaccatgagggcggacacaaggaccgactttatagtggttccccccggccaggacacgcggcggagcgtcgagcagtccactcaaaccatacagggcctggaagccacaggagaacaggcggcggaggcgccgcgtccgttcggtctgccggcgcggctgcgcgtggcggggctggcgcggcggcgcgcgcgcgtgctggcggcgcgctccgaccgctacctgtacacgctgtacaccgtcggactcttctacgcgctgcccgtgctgcagttcgtcgccgccttccagatcttcctgaacgtgtcggggtctctggacgtgtgctactacaacttcctgtgcgctcacccggtggcggggctgtcggacttcaaccacgtgttctccaacatcgggtacttgttgctgggcgcgctgttcatgctgcaggtgcgccgccgcaggatgcgacggaagaggaagccccgagacgaggagtacggtatcccggcgcactacgggctgctgtcgtcgctgggcgccgccatgatgatggtggcgctactgtccgccacctaccacgtctgccccaacgcactcaacttccaattcgacacggcattcatgtacgtgctggcggtgctgtgcatggtgaagatataccaggcgcgccaccccgacatcaacgcgcgcgcgcacgctaccttcggcgtgctcgccgtgctcatcttgctcgtggtgtggggcgtgctgggcggcgggccgctgttctggagcgtgttcacggtgctgcacgtgttcaccttcctgctactgtcgctgcgcatctactacgtgggacaattccgcctcgagaagcagagcctggcggaggcggcgcgcgagctggcgtcggtcccggcgcgcgggctgcggccgctgtactccgcgcgcctcgtcatgctgctcatcgccaacgcagtcaactggggcttcgcgctctacgggtacctcacgcttcttttttatattatgtactagcccaacgtttggccactacctcgtctcgcgattatgcggtctgcgatagaatacgactgcccataagcttttcactcgagttttgaagacccccagatatataatactcttcggcctacgagagatagattctaacaaactactccttaccggttctatacatcgcagttgcgcctgtcccatagcgctgaataatttgcccatggacctcactcgtgtgtaggtgaacgtatctattacagcatatttgaaatcgaataaaggagtgtaagtacatacctaataaaattttcatttgcgtttcgctgaacgttgtggtcccacatgtacatagtgctagtacccggcagtaagtgtgtgtgcagtctgttcacgcagagcgcggacttcgcgtcgcacctgctgtcggtgctgctgtgcaacacgctgctgtacatcgtggtgtacctggccatgaagctgctgcacggcgagcgcccgcgctggtacgcctggctctacctggccgccgcctccgccgcctgggcgcccggactctacttcttcgtcagcggcagcaccgactgggcgacgacgccggcgctgtcccggcacctgaaccacgagtgccgcgtgctgcagttctacgactcgcacgacttgtggcacttcctgtcggccatggctctctacttcaccttcaacgtgctgctcacgtgggacgacgggctcgctgccgtcaaacgcaccgaaattgcagtgttttaataaatgcctctcttattcaatgcattttttatgtcgaactctctctactctgtaaataagtattaggtacttgcacgttagaaaacttacagataacatgagcatgcgcaacgttcgccacgacatctgacgtcgcgtatgctgttcatgattctttagtgatgggtccctatcgttactcgaaactagtcgaacaaccactttaaacagttatgtgagaaatctgtattgcattaatttatctaattaacaggttagtcaatgctttatattctgtaattggttatttgggtgtatcgtttagaatctaattataaaaatgttatggaatttagttttaacccgattttagttatcaacggagcttaattaatatacttcggtacctacccatcctaccaatcgatatattacccaggctttatttacgtgctgcgtaaagataaaccctgaagctgaatgtattagcatggtgcgcctgaagcgtaataatataccaacacttatgctgatggaatatgccattgattttgaaaccaaatgaacgattatgaaccttaaacattcgtacaaacatcaattatcgccataatcaaatggtgtggttccattagtgtggccccagctttaggtacctacatatcgtgccgcgcgggtacctatacgacacttaagtccatattgtgtaggttttgtgtttcgaaacgatgtggtctgttgtagttgtaggccacaagtggccgcatgcttcgtcgattaggtacaccagacaccaaaaacttagtacatatatagtaccctaaccaaataaggcctatgccccaataaagcctattttgaaaatttccctcttcccgatgtcaaatggtcgccaaagtttgtagaagtgtgcatgcacattacttaactaatttgagcacagcaagcaacccgtgccgcgattatgttggaacctacagacgaaaacaatcacgacgtggagcgcactttagtttttataaaattcgagtagcgtaaacttagtatttttatatttatcagtatacgacgtgccgtgttttgtctgtatgacaattatacatttagccatctcctcacattagtgaaatagctataatatcggtgtatttcatataatcgttgctttttttaccta

SEQ ID NO: 202 - DNA, 1989 bp, Spodoptera frugiperda
caataacatgcagtctagtccagaaatatgaagtaacatgaaaattatttatttttgatttatttaaagtaaaaatttttaaatactatatttgtgttgtattgtaatagttttaagtgcaaaatgtttattaagtgtttattatttttatttgtactgagttttattgaagcagatttttactacccggcttcaacatgtccgatgcgtcgaataaaaaatggtcgagcacggccacggcaaaggggcacttttattaagttctcgtgttctcctcgttataccctggttggtaacaaatatgccacgtgcagatttggccaatgggatgtcccagcacccgtatgtgtcaaatcgggctgctcacagttacaagaagtgaagaattcagtaaatatgacatatcacaataatgcgtgggtcgtgtttttctgtttgcccggccatcagctcattggttcaccagtcgtgtactgcgatggatccaattggaactcaactgtgcctggatgtcgtgatagttcagcaaaagtgtcaacggaatgtgacttcgagctgccggatttatgcgggtggaaacctgatgagttacacgatttcgattggaggaggctaaataaaaagacaccgagttcctttttacaaactggacccagttacgatcatacttatggaaagaatgggtcaggttactacatgtacatagaaactacaggcagaacggagaacgagacagcgcgtctcctgtctccagtatatgatgctgaactggcgaagaatggatgcttcatcttttactaccacatgtatggaaggggtatgggtggtctccgggtttaccagaaaccagacagagtaccaatgtatcaactgctcagttcttcaaagaggaacaattacctcctgtttgagcagtggggggatcagggcaacgagtggtacagcagtgcctcaatgctgactgatgtcgatgatgatttccagatcgtaatcgaaggcatcagaggaaatagtttcatgagcgacattgccattgatgatgtgtcgatacaacgaggggagaactgcaccaaagccatgctcgaagccaccacgccaccagctgttttacaggaatcatgcgtgggtcgctgtgacctctatgctgaggcgacgggctacagagggtgcagttgtagcatcgtctgtgtcgtcacacagaactgctgtccagacttcctggacgtctgcgatttggatggaatctcgttagattcagatgcccgaggcagttccacagcagcattgccacaaacacagaaactaatagcaacgacaccagacggaaacgaaacagaattatccgatgctaccacagcaacaactaaacttaccataccaacaacaacttctacgaaaagaccgataactaccagacctccaacaacatcaaccactactaaaagaccacctattatcatcaaaagaccgacaacaacaactaaagctactacagttactaaacctactactacgtctcctcgtactactactgcatctccacgtactactacttcaactcctaaacctactcctaaacctacacctaagcctactcctaaacctacccctaaaactacccctaaacctactacaacttcacgtaagcctacaacagttacgactagtactgtaactgtatcatccaaaccattaacaatgcccattgaagtgtctgcagctactgaaggcacttcagtgactcctaagcagggaacacaagaatatcttgcgaagaaatctggaggtctgagtggagctacattagcagtgacagttataatagcaatcgcagcaacgttcggtctagtatggctcgccattgtactgactagatcgcgaggtttggcagccctggctcgcatccgcggacgcgccacctccgaccctgaagtccattatctcaagtccgatgttgatgatgaataaattattattatttttatattt

SEQ ID NO: 203 - DNA, 1458 bp, Spodoptera frugiperda
tgtcttgtgatttcgccaaattatttgctgtttcgaatatttattgttaaacagcattatactttaagttctagtggtgaaaatgtcggagtactgggtaatcagtgcgccaggcgacaagacgtgccagcaaacatgggacaccctgaacaatgccaccaaatctggcaaccttagtgtcaactacaaattccctattcctgacctgaaggtcggaactctggatcagttggtcgggttgtccgatgatctgggtaagctcgataccttcgttgaaggtgtcacaaggaaggtggctcagtaccttggtgaggtacttgaagatcagcgcgacaagctccatgaaaacttgatggcaaacaacagtgacctgcccacgtacctaactcgcttccagtgggatatggccaagtaccccatcaagcagagcctccgtaacatcgctgacatcatcagtaaacagctgggtcagatcgacgcggatctgaaggtcaagtcgtccgcctacaacgcactcaagggcaacttgcagaacctggaaaagaaacaaactggcagcttgctgactcgcaacctggcggacttggtgaagaaggagcacttcatcctcgacagcgagtacctgaccacgctgctcgttattgtgcccaagtcgatgttcaacgactggaacgccaactatgaaaagatcacggatatgatcgtgcctcgctccacgcagctcatctaccaggacaacgactatggcctgttcaccgtcacgctcttcaagaaggtcgtcgaagagttcaagctgcacgctcgcgagcgcaagttcgttgttcgcgagttctcgtacaacgaggccgacctcgctgcaggcaagaacgagatcaccaagctcgttactgacaagaagaagcagtttggtcccctggtgaggtggttgaaggtgaacttctccgaatgcttctgtgcctggatccacgtcaaagccctccgtgtgttcgtcgaatcggtgctaagatacggcctccccgtgaacttccaagccgtagtgttggttcccgcccgcaagagcgtgaagaaactgcgcgacgtgctgcaacaactctacgctcatctggaccactccgcacagcaccacggatccagtgcgcaggacagcgcagagctggccgggctcggcttcggccaatcggaatactacccgtacgtgttctacaagatcaacatcgacatgatagagaaggcggcctaggctgcacgcgactattactgttaggtatatatttgttaccaggttgcgcatagctctgccggaggccctaagcaatagttgcaatcttcgttgtacaatatattgttttatttcacaaatatcaaattgtaaacacaaattatattttaccaaacccttggttcccttgtaaaaaaaatcgtatattatatatttccaatatatttttctatgtacag

SEQ ID NO: 204 - DNA, 1585 bp, Spodoptera frugiperda
gcggccggcgccaggatgtctgaccgccgagcgggcgccgcgggaccgggctcgatattgattgagtgcacgagcccgttgcgtcagcgttctggctaaaaacaccagaccgtcggctgcttccgcgggctctgcactgcatagtcgcaacacaaaatcgatttttcggtcaacgaaaatgttttcaagtggatcaaacactggtgaagatgtctgaatactgggtgatcagtgccccgggcgacaagacgtgccagcagacctgggacaccctcaacaatgccaccaagtcgggcaatctcagcgccaactacaaatttccaatccctgatctgaaggtggggactctggatcagttggtggggctgtccgatgacttgggtaagctcgacaccttcgttgaaggtgtcacaaggaaggtagcgcagtatctcggtgaggtactagaagaccagcgcgataagctccatgagaaccttatggccaacaacagcgacctaccatcgtatctaactcgtttccaatgggacatggcgaaatatcccatcaagcagagtctgcgtaacatcgctgatatcatcagtaaacaggtgggacagatcgatgcggacttaaaacagaaatcgtccgcctacaacgcactcaagggcaacttacagaacttggagaagaaacagaccggcagtctgttgactcgcaacctggcggacctggtgaagaaggagcacttcatcctggacagcgagtacctcaccacactgctggtcatcgtgcccaagtcgatgttcaacgactggaacgccaactatgaaaagatcacggatatgatcgtgccgcgctccacgcagctcatctaccaggacaacgactacggcctgttcaccgtcacgctcttcaagaaggtcgtcgaagagttcaagctgcacgctcgcgagcgcaagttcgttgttcgcgagttctcgtacaacgaggccgacctcgctgcaggcaagaacgagatcaccaagctcgttactgacaagaagaagcagtttggtcccctggtgaggtggttgaaggtgaacttctccgaatgcttctgtgcctggatccacgtcaaagccctccgtgtgttcgtcgaatcggtgctaagatacggcctccccgtgaacttccaagccgtagtgttggttcccgcccgcaagagcgtgaagaaactgcgcgacgtgctgcaacaactctatgcgcatctggaccactccgcacagcatcacggctctagtgcgcaggacagcgcagagctggccgggctcggcttcggccaatcggaatactacccgtacgtgttctacaagatcaacatcgacatgatagagaaggcggcctaggctgcacgcgactattactgttaggtatatatttgttaccaggttgcgcatagctctgccggaggccctaagcaatagttgcaatcttcgttgtacaatatattgttttatttcacaaatatcaaattgtaaacacaaattatattttaccaaacccttggttcccttgtaaaaaaaatcgtatattatatatttccaatatatttttctatgtacag

SEQ ID NO: 205 - DNA, 2349 bp, Spodoptera frugiperda
caaagtcggtagtgacggagtgtaaggggtggtttggggtgaatttcttgggctagctcgcggccggcgccaggatgtctgaccgccgagcgggcgccgcgggaccgggctcgatattgattgagtgcacgagcccgttgcgtcagcgttctggctaaaaacaccagaccgtcggctgcttccgcgggctctgcactgcatagtcgcaacacaaaatcgatttttcggtcaacgaaaatgttttcaagtggatcaaacacgtaacgttggtttctgcgagggtttttgctgtgagtctttatgttttaattgttaactgaagtagatagtttactgttctgtgtacttgcagtggtgaagatgtctgaatactgggtgatcagtgccccgggcgacaagacgtgccagcagacctgggacaccctcaacaatgccaccaagtcgggcaatctcagcgccaactacaaatttccaatccctgatctgaaggtggggactctggatcagttggtggggctgtccgatgacttgggtaagctcgacaccttcgttgaaggtgtcacaaggaaggtagcgcagtatctcggtgaggtactagaagaccagcgcgataagctccatgagaaccttatggccaacaacagcattgactcatacgcggacccgggcgggggcgagcctccgcccacgccgacgtccccggtgtgcgactccgcgttctcggagcaccacgggtgctggccgtgcgagcatcgagagcactccgaatacgaggcctcgcagccctcgcaaccgtccagcggccgcagctcgccgcgctgggacgacgacgacgacgaggaacgccaccaccatatactcacgcaaggcgacctaccatcgtatctaactcgtttccaatgggacatggcgaaataccccatcaagcagagtctgcgtaacatcgctgatatcatcagtaaacaggtgggacagatcgatgcggacttaaaacagaaatcgtccgcctacaacgcactcaagggcaacttacagaacttggagaagaaacaaaccggcagtctgttgacccgcaacctggcggacctggtgaagaaggagcacttcatcctggacagcgagtacctcaccacactgctggtcatcgtgcccaagtcgatgttcaacgactggaacgcgaactacgagaagatcacggacatgatcgtgccgcgctccacgcagctcatccaccaggacaacgactacggactcttctccgtcactctcttcaagaaggtagtagaagagttcaagcaccacgcccgcgagcgcaagttcgtggtgcgtgagttcgcgtacaacgaggccgacctcgccgccggcaagaacgagatcaccaagctcgtcaccgacaagaagaagcagtttggtccattggtgcgatggttgaaggtgaacttctccgaatgtttctgcgcctggatccacgtcaaggcgctccgtgtcttcgtcgagtccgtgctgagatacggtctgccggtgaacttccaggcggtggtgatggttccgtcgcgcaagaacacgaagaagctccgcgaggtgctgcaggcgctgtacgcgcacctcgaccactccgcgcaccaacacacctcctccgcacaggacaacgcggagctggccggtctcgggttcggttcgtcggagtactacccgtatgtgttctacaagatcaacgtggacatgttagacaaggcctaaccacgtcgccacgctgcataaacccccgttatattaggtaatgttaccaggtactttctcctgtgtctgaccacgtaatggtcgcgcaataccatgaactatcatcgtacaatttattttacttatacaacatatctatacgaaatttatcattggcccttgaataaaaaatccatatttttctatatgtacagatgtttttgacataattttgttttgtgacaactttaaatcatatttttttcatttacaaactggttgttgatataatgtttgtgtaatttataactattatatatatctatgttatttataaataagatgccattttgagaattgagataattagaaaacaaagaatataaaaattgttgcaataataattcttgatggagcttactattatggctttttgttgaatgttaaataaacactgttaataaataaataaataaatgattgagttcagtattatacttgagttgcgtagtgtagcgtgacgcatgcaatgtatattaaagtaaataacatcagatgcaaactatgtaaataagaacattcctcatacatgtgtgtagtacataataaaatattattcaagttactgtt

SEQ ID NO: 206 - DNA, 1437 bp, Spodoptera frugiperda
aaagctctctgaggccaggtccaaattaaacgataatgatagaagacatattaagttgataagggtgggtcccgaaacgagcatgagcgaagtagcaaaaagatattcccttagagagtttacgcgaaaaaatatattgagtagtaataaaaacgcattacaccaaaagtattctcatgttgcccatcaaatagatgtaaatacatttttaaaacaagaattaggtgaccagtatgattatattatcagaaatacagaagaaacattactcagtaacgctaatataatttgaaacattactcagtaacgctaatataatttgcacgacacttaatagcagtgtcagctacattctcaccaacagaagatcgaacgtaaaatacactgcttgtattatcgatgaagctactcagtgtactgaaatagaatgtctttttccgattatgctgaacgtagataaattcattctcgttggagatccccaacaattacctgcagttatctgcaataaagaagcccaagatgtcggttttggcaaatctttatttacaagaatatacgagaattttgtcaacaatcgagacaacagcccgatgaaaatgctgtgtgaacaataccggatgaacccagccatctgtgattaccccaatagaaaattttatgatggagcactgaaatcttctccaatttgtactaatccaatacagccacatctgaagccttatttagtattcaaccttatgaaccctgcaacctcatataataaaagctctgaatatgaaaactccaatgaattggatgttgtttcttgtatattaaaagcgttgaatacgcatgtagtgtcgacctgtaaatacagtgttggaattattacgccttatcgagcgcaagtggttttaatttcaagatgtataaaggaaatgaagatgaacgataatgtaagcgtcaatgtaaatacggtagattcgttccaaggcacagaagatgacattattattatttcctgcgtgaggtttagccaaaattgctttttagctaatgagcatcgtttgaacgtcgctctcacgcgaggcaagaaagctgtttatgttataggcgcgaggcaagaaagctgtttatgttatagggaatcattctcttttcaagcaatgtcgaccgttatatgatcttagggaaaatgcgaaacaaagaaaagttcttcttgacataccaaacaatccactgtcgataccgtcattccataaactgatattagatgtacgttaagaataaaaagaaaaataagtttattatgtgccagactaatttttttgtatataatccagtgatgagccaatctaaagaaaaattgaatgattaattatctattataaatatattttaatcgtattgcgcttgttgcttgcgacaatataaattatgtgataagatcagatc

SEQ ID NO: 207 - DNA, 3803 bp, Spodoptera frugiperda
tcgttctggatctatgaattaaagcgaaaatgatataaaaaaacattaattctatcgccatttttgtaaacattattatttggcaaccggaagtttgtgtgttgtctgttaccagtaacgccaaggacttttgtttggcgcctttacgggccggtctggttttactgataattttgtgaatttctctcaaacaaactaaagttattgttaaatataatgggtgacaaaggtgacggagaaacctttgatgatgcggttgaagagagggtaatcaatgaagagtataaaatatggaagaagaacactccatttttgtacgatctggtgatgacacacgctctggagtggccctcgctaactgcccagtggctacctgacgtgactcggcctgaaggaaaggattattcagtgcatagattaatcttgggtactcacacatcagatgaacagaatcacttgttaattgcaagtgtacagcttcccaatgaagatgcacagtttgatgcgagccattatgacaatgataaaggtgaatttggtggcttcggatcagtgtcaggtaaaattgacattgagatcaaaatcaaccatgagggtgaagtgaacagggctcgctacatgcctcagaatccctgtgtgattgccaccaagactccttcttctgatgtactggtctttgactacactaagcatccatcaaaacctgaaccttctggggaatgccatcctgatctcagattgcgtgggcaccaaaaagagggctatggattatcctggaatccaaaccttaatggttatctgctgtcagcaagtgatgaccatacaatatgtctgtgggacataaacgcgacaccgaaggaaggtcgcgtcattgaagctaagtcggtgttcactggacacacggccgtggttgaggatgtcgcctggcatctcctgcacgaatcactattcggctctgtggctgatgatcagaaactcatgatttgggatactagatgtaacaacacatcaaagccctctcacacagtagacgcgcatactgctgaagtcaactgtctcagcttcaatccctactctgaattcattctagctacaggcagtgctgataaaacggtggcgctatgggacctccggaacctgaagctgaagctacactcattcgagtcacacaaggacgagatcttccaagtgcaatggtcgccgcataacgagaccatccttgccagcagtggtaccgacagaaggcttcacgtgtgggatctgtcgaagataggcgaggagcagacggccgaagacgccgaggatggtcctcctgagttattgttcatccacggtggacatacagctaagatatcagacttctcatggaaccctaacgaaccgtgggttatctgctctgtgtccgaagacaatattatgcaggtatggcagatggctgagaacatctacaacgacgaggagcccgagacgcctgcgtcggagctggaatctggtgtgaacgtgaaccacggctagctccgcgccagcgtagccggactccagcagacagcagacgagcctccactgtatgactctatgtacgtaatgtgacaactacaccatacacagtacgcgttaatacaccactctctaataggcttaactatgttctcgttaaagaaaccggactgtctgttcaacccatcttaagttctatttcataggcaaaatagttaattaattattatgttatcggcttactcacgtatcgttttgacgaggaactctactagatacgtgagtaagcaataattaatttagtatgtctcacgaaagttacaataaaatcaaaatagttaatgttattttcaatggatgaaagtcaccatatcgtattgttagtgttcattattatctcattcactctgtaatctgccacttaacgcgtactgtactgtcacccgggctctataacaagtttcagtttaaaatatggaaattatacatagagctctttcgtgataagaaattcgttcttaaagtttatacagtgtattgaatttgttttcgattacaccctgttaggccaaaaataaatatgtgaattaggcaaattggtttttgtttttatgttctcgactttccgtcatgctgctatgtgatttttttaacaaaatgtcaagttactgtgtgtaattttgtgatgaaggcaacagatcagaattagatgtgtctaggtagtgattgggtgttctttcgtggcattattgttattccttgtttgggcaaaggtgttgaaagtattaaagtatgtttaataataatatcataattaaattagtggtgaaaatcaatacttagtgtttctctgagaagtggcaacgcatttgtttgtcgtagtaggtaaacttagctaacatgtcccgaatacacatcaatccatgcctatactctaacaatgatcaacaatgaaagagctctgaaaacagtaatttgagtcttatgtccgtaaactatagatgtaaaaattattgatatggtcaacaagtacatacttgtacgatattagatgttaagaaaagtaaaacatgctgcaatcataatttgcagtgaatttgttattgattgaggaaagaaatttgaatatttttgcataatctgaaaattatttttgagtccgtattttgtactttattatgcagtttagttgctcatgtgttttgatatagtccactggtagaaacaatttgtatgaaaattcatttccatgtcctctgtcatacaatgttcgaaattatatttgttatccttctagcaatctctagttttcagcagcaaattcttgtaacataacaaagctttttagctttgtagtagcttctaattcgattgttcataatctgctgtatagtcgacaaaattgaattgtagattctgtagattataacacgaaaatcatttaatcaacagattccaatgattaaataaaatagatcagatctcatttcgatctcgttccaaatcattataagaatgttgtgacataaaaaacatgtttcaagcgatttaaaataaattttgtaaatgtttctaccgttggactattcaaaatgtaaagggtccaattagttgtggtctgtatgcacaagaatctctcagacaatgtcagtttaatgaattaaaaaacatatttttgtataagtgaaatattctattttgttttgatgtaaaataaatgtgcgtatggaccacggacgtgcgagaaacagtacccacagcatagagacacctcgctagccaactggttaattccattttaatttattgtttcttatccaataagtcaaaggatgtgtttctgttgtaattgtcattattattatattaagggcctctttcacacccagtattccgtagctccgtactacatatctatgattaaataaactatacaagaataaatacacctgtagccagtagcatttgatagcttagctgtcatagtatgtatgtaatacgtaaacatttcactactgataatgatgacatgctgagctatcgaagtgtagtatctcgttgtaatgcatgtttaatgtttagtataccgagtttcacatcgtactagcacaaagtgaaagatgctcttactctggtgacgcgactgaccgatggtattttataatgttaatgcagtaatggaataatttttaagctctgctaattaattacctattatgattaaaagtatcgtaataatagttttgtttttatacacccacaacaaactgttctataaataaaattcccagtaagtaaataactta

SEQ ID NO: 208 - DNA, 3376 bp, Spodoptera frugiperda
agagcaggacatgcactcgaaggcggggcactagcgagacaaacggcggtgcccactccactgctcattcgtctttcgcttagcctccgctatgtaaaccggccttgttgtgaatctaaacaaaatcggtcagtcgtcgttttgttgccgtaagagcagcgcgtcggaggttccgcgctttcgggttgagcatgttgcgacagtgaacgtagccggcaaaatgcacgcgttgtttggtgaacagagcccgtatgcgtatcgtggaggagccgccggtggttactcagccggtgtgacaccttatgcctatgaacaataccgctatggatatggagctccctaccttcacccccatcaacagcatgttggtgcaccaaaagacatggtcaagccgccttactcttatatagcacttatagctatggccatacaaaacgctcctgaacgacgtataactctcaacggtatttaccaatttattatggaaagatttccttattacagagaaaacaaacaaggctggcaaaattccataagacacaatctaagcctcaatgagtgctttgtgaaagtggcaagagatgataaaaaacctggtaaaggcagttactggacgcttgatcctgattcatataatatgtttgataatggctcgtacttacgccgtcggcgtcgctttaaaaagaaagatgcgcttagagaaaaggaagaagctttaaagagacaacagcagttacaagaagctcaggaggcactcactgcgcaggaagcactgactgcatcggacactctaggacaacaacgtgatgttaagcctgatgtcaaaccaagaatcttcgaatgtcgaccgaaacgagaacccggcgcagactgtgcaagatatgacaagcctgtcgacggtcttgatgacttcagtgaacctcgacttccagcatccgcagtttattgttcacctcaaccttattcgttggtggccgaggaatttcgtgccgctacatcagggtggtatgcggcgcccgaacctccggcggagcaactgcctccggcgttccgcgacctctttgagccgccaagctgccaactagccggattccgcagtggttcacccgtaccagacgcgtaccgtgcgtcgccaccgccacatcaccattatcgcacaccggcaccttcttactaccatcaccaagcctgcgtcgccgccggtcctgcgccagcacataagtcctactgagaccaagctctcaggaggccggcatcgctcggcgccgaacggatttagccgcacgcgtcagttccagagcggataaatatagcgcagtagccggagatgccgtggaggcaagtggcggcgcgtcgataaccactgtttacagatcggcggccgaccctgccgcctcccgctccgttcacacctataggtatggcggaacaagaagatagcgggaggctgagtgcaggggtgacgcgagtatttaacgtgtctggaagagatggcgacatagtgttgtaagaactttattccgcgtggtgcacatattgtagcaaacgtctcgtatttataaagttcaagctatcatcgtatctccataagagatattaacgaatgatggcacccgaagacttattttagtatgtatattcgtttacctatgaacttactataattaatagataagacgaaaaccgataattccgaaataacgtagcgttcattaatgtcgtaggtaagtaggccaggacatacataagttacagtattacccgttgaaacagtattatgtatacccacatgatctgtaaacaaatattacttattagataaatgtaaatatttagtcattaaaacctagtaattgtatgaggtgtagattttcccctgtgaaaaaaataatagtttttctgaaaacatatttaggggatgtgttgttattctagtctgctactttaggcaaattatttctgtaatagatatctatatacatacagaaacaggagaaaatataaaaacgaaacaaactacctatgcacatggatttagatagcaacgaacgaaactataacataaagtaacatattaactaaaacaatattattgtcaatgcattgtatctattatattgttatctattaaatatttttaaaaacgacgagtgaataattttcctaccctgaataggtgattgtaatttacagcaggcagacatcaaactaaaaaatgaacgtagtatattgaataaattatatacgtatgttaatcaatacaattaaggttagcaattagtagaattgtatattaagacacgaacaaatacgaacagccagtctcttttaactataatgtcctacgcaaagaaatactatgtatcacttcactttacttatagtatcatgttgaaactgagacgaggtattatttaaataaacagcataggttttagtgtataataacagcatttttcgtagcgtaggtgataataattagtgaatctgtaaataaaattgtattttgatggatttcttcccttggtaattagcaaaaataaacaatatattatatagattagacaggaatcaaaaaggtatcattatgatgaaatatgtttaagaagtcaatagaaatcgtgagcgctaatagcgtgtctttgtaagttcgtttatatacgtatatgatatacatgttctttatccataataactatttattagatacaaagcaatctaactacatacatcgttcagttacaaaaactagcttgtaaaatgtaagtgctaacttcaatcgtgtctctaacgtaaaccgattatttatacgtaactataatttaagcattatcgtacatattcatttccatgaaatacccacaacagataatattaaaaatatggagatttatgtaattaaatgaattgtaatttaagttaaataaatactcgttcatacattatgtcgggaacgaaaagacctgcagattacgcagaacaataaaataaatattcgccagtgaatatttagtgctgtgtattttctggatgttatgtagaagtaatattttaatgcatttcttaccttcataaagtgaatacaagttattacatcttctgctaaattcagaatctcgctacactgcacaaaagtacatagcctagctaattgatgtgaacttacatagctaattagatatgtaagtacatacataattatgtatcaacataatgtacttataggcacgtgtttttactatagtaaaatgtacatcagcaatattgtcatacttagttcacaatgcatcatttattgtttcacatgtaataataaaatattagatgtcctacctattagctgataaatttgtgataattatcgtaatcgtgtgta

SEQ ID NO: 209 - DNA, 3726 bp, Spodoptera frugiperda
atgcggaaaacattaagccttaagaaggcaggtccttcaaaaaatcaaaaatctattacggacttccttaaaagtgctaataatggtaccagccagaatcagaagccgcttgcggctgataaaattaattccgtacaagaaaaatctactgatagcaaacctaacaaaaggaaggcatcgtctccgattattgaagataaagagttggaagaatttaaggaaaaaccaaatgtgaattatggaacttccaaaagtacaccaaaaaaaattaagactgaaaataaaattttgtcaccatattttaaaaatagtcctaagaagaaatcacctaataaagaaaacatttttacaaagaaaatatctcctaagaagaatctcttaaaagattttgatggatctagtaagaatagtcaagagtctgataattcatcacccaaactgtgtaaaatttgtatcaccaccccaccgaatgccaagaataatatagaaaatcatgtattacctaataaagttaatcataatgttaaagatgaatcatgtatatttgaaaatggaaataaagtagattataaaacaagggttgtcaccccgaacaaattgtcaccaacaaccagtaatggtcctgtacccagccctaagttaagaaggagtaaaacacctaagaaaagtcctctgcaggagttcttttgctcccctataaacatactggcaactccagagaagactctcacggagatattatctccttccaaaagtggttccactgtcaaagtgctggattttggcacagaggagctttgtgacgactttggagatgaatgggaccttaatgatgtggaggaggatggtatagagaacctagatctaagtacaatgcagcgctgtgagatactgagtgctaagagtatcactaatagaatagaactgagactgaagagtagtgatgacaagagagctacatgttttgtggaaggatactggatagacaccccattagttcccggcgatatagtcagtgtactagccgcgcgggattcctcagggcactacattgtgaccaacacatcaggtctgctcgtattacgcccagaccacttgatgtccagcactagtgttgttgccggagtcttctgcaaacggaaagcagtactgcaggaacgatggagaggaatcgattcggctaatatggctatgacaacaggaatattaatacacgaactggtgcagaaagctctgactgagaagattgcggcgacagatcgccttcagtcagtgacggacgacattataaaggagtcggttgagagactgttcgacgcgggactgagtgaggaggaggcgaggagtgctgtgtacaagtacattccgccgctagctgacttcatgaacacttatgtagctgataaaccacccactgttgcgaatgtgaaaacagataaaaacaattggtcaggccacattgataagatattggacattgaagagaacctgtgctgccccaaactgggacttaaagggaaaatcgacgccactgtacaagtcaccatacatgagagaaatggtcgtaagaaggcagtagttcccctggagctgaagagtggcaaggcgtccatgtcggcggagcaccgcggccagttggtactgtacggcatgatgctcaacctgcaggccagtgaggatcccacgcaggccgcgcagcgaggcctactgctctacctcaaggaccgcgttgacatccgtgaagtaagctgcggttacccggagcgtcgagatctgatcatgttgcgcaaccaactcgtacaatacgtcacaacgtcgcctcaggacatcgatccagagaatctagtggacatagaggaagcggctatcatgctgcatcagaagctcccggagccagtagaccaccacagcgcctgcgccaagtgtccctacctcacactctgctcattgcatctatggcacacagacggccccaccgtgtcagagtcccatcccctctcgagcttgcaagccgaggcactgggccacctctcaccgaagcacattcagtacttcctacattggacggcgctactccggatggaggagagaggacagatggtgacgtcacctctacacgcgctctggactgatagtgttgaaaagagagagaagcgtggtacctgtgccgcgaatctgaggctagtcacagtcatgcatctagaagatagatatctacatgtgtttcaacgaaataatggcagtaatggtgatgtagatgtaaaggcaccaaaaggtccacaagagggtgagttttcaatagtcagcattgagaaccgaccgtggatcgcggccggagtcgttactatcgctaatgccaaacaaattcatatatttttggaaagagacctaagtagtcgtttgtccgcacaaacagtataccacatagacacatatgagtcttacgcgactacagtacagaatctcaccaatctgggcgtcctactcgaagatagcgatcgagccgaccgactccgaaggttaataatagataaagagcttcctgaattcgaagttaagttacctcgcgacgtgggtcggctgggcgcgcgactgatgaagtctctgaacgtccaacaacagcgcgccgtgctcaaggctatcgctgccagggactatgcgctcatgaaggggctgcctggcactggcaagacgcagacaataagcgtactgatacagatgttggtggcgttgaagcaacgcgtccttgtcactgcgcacacgcactccgcggtcgatactgtactcagcaggttaccggcgtcgctgcgagtgctgcggctggggtcggggtcccgtatagcggccgcggtacaggcgcgcagtgaacacgcactcgccgcctcctgcgacactcccgataaactagctgcgctctatgattctatggaagtagtcggtgtgacgtgtttgggcgctgcgcacgcaatgttagcacgaactacgtttgatctatgcatagttgatgaagccacgcaggtgttacagtgtactgtgttgcgaccattgttcgcagcgaagaagttcgttttagtgggagaccctgaccagttaccgccggtagtcaggagtagagctgcgaggcgcctaggcatggaagagagtttattccacagactgatgtgcgaggaggcgacgtcgacgttacaactgcagtaccgcatgaaccaagcgttggcggacgtcgccaaccgagtggcgtatgacaaccgactccagtgcgccgacactaacgtcgctgaagcccgcctgaagatagatgtacagaaaatacatcaactgtcagcctcgccgtggctatcaatggcttgtagtccagagccgcagtacgcagcattgttcttggatgtgatgtctagtaatattggagatgcagccgacggacctataaagaactcttgcgcaaaccctacagaagcttgcgtggtgatatcattggtagaagctttgaaacagggtaacgtcaagccctcagacataggtgtgatagcgccgtaccgagaccaagtgtcactcctgcgccgcgccctccaacacctcgctgtagaggtcagcactgtcgaccagttccagggaagagacaaacccgtcatcatatactcgtgtataaagcgttccgacaaacatgatgacaagaaggttaaggagggtgaagtcctgaacgatcagcgccgtctagcaatcttc

SEQ ID NO: 210 - DNA, 1665 bp, Spodoptera frugiperda
ttttgctctaaaggaatcaagctttcgttttgtcttcattttattgaaaataaacacaactcaatttggtcgcatgttagatacccatgctgtcaaatgacagatttgaattttgatgacggaaagaaaaaggttatacacagtaaaagagggaataggttgatttaagataaacgtatttaataactgttattaaatattatttaggtgtacctatctcttatttgtgcagtgtaattatagaatcataatttgagttttgtatacattcaaatagtccaattaaagcaacgtgtcctaggttaggccgttggtgaaacatgttagttcatttaaaataacatgacagagaggaaaatgtgcaagttctacaatttaaacgtacctgaacgtcgatctggggagggtggccaaggtggtcacggtggtggcgttaaccagaaccacggtaataatgacgaggatgacaggaactctgacgaggcgacgccgcctccggtgccggcgcacgagcacaagctcgagtattcctactggatgtggttctcgcgacgccctcccgcgcgcgagttgtccacttctccttcaggctacgttcaggcgttacgtttggtgggtagggtggccagcgtggaacagtggtggggcctgtacacgcacctggcgcggccgtcggagctgccgccgctgtccgacctgcacctcttcaaactgggcatcaagcccatgtgggaagaccccgccaatgtcaatggagggaaatgggtcgtgcggctacgcaaaacacagacgggacgcgcgtgggaggatttgtgtatggcaatgttgggggagcagttcatggtcggcccggagctctgcggtgttgttctatccgtacggttccaggacgatcacctagcggtgtggcatcgcacggcgtcggacacggcgatggcggcgcgcgtgcgggacgcgctgcggcgcatcctgcagctgccggcgacggtgcccatcgagtacaaggcgcacggcgactgcctgcgcgcgtccgccagccgcgcggcggcggacgaggcgccgagcccgcccagcccgtcgccctcgtcctagccgccgccgtcgcagctactgcggtgtgaaggaacatgacactgtcgccgtgacctgtggtgcaccgagtacgcgccgataactttagtttgccctgccgaacccaaactgttcaacgcaaaacgagacttgtgacattacctttctgtaattgttaactattaaatcagtaccgatattaggaatacttttgttataggctaaagttaaccttcacccgtactacaccagctagcagagaatgataatgtattaatttgtattattgattgaatctgagatatgagatacaactgctgcccgcaatagtctcgccggcggctcacggcgggcccgcgctgccgatgtacatatagtcaaattccgagtaaacaaaactagtttgtgtacgcggcgtcgagccgtgagctctggcgccacacacgctacccgatactattgtacagtgaaggaatataataaagaatcagcatttgtatactttacatgtgttttttcttataccacaaagcgtaaaagcttttgcagacagataggtattttagtatttttagccggcgctaagccaatcga

SEQ ID NO: 211 - DNA, 1389 bp, Spodoptera frugiperda
aatttttaaattttaaacacaaaaaataatttagtgacatttgtcgttaaaacgttggcagtgctgctccctgacccttcttaacataacctgtaaaattcgttttacaggattataattttgcttccgaaatgtctacaaattctctagaaaatgagatcgacaaaaacgaacagaaaaacgacaacgatttagaaatacccatggacttttctataaaacatcccttacaaaatgcttggactctatggtattatgaaaatgatagaacccaggcatgggagaaaaaccaaaaagaaattgccactttccaaactgtggaggacttctggagcctttacaaccacatcaaaccttcaagtgaattaaggcaaggaactgattattccttattcaagaaaggaattagacccatgtgggaagatgatgccaataaacgaggaggcaggtggctgctcagcttagaaaagaaacaaagaaacaatgatctagatagatactggttagatattatattatgccttattggtgaagcttttgaaaattctgaagaaatatgtggagcagttgttaatataaggcaaaagggcgacaaaatagctgtttggaccgctgatgcccagaacagtcacgcagttctagagattggaagtaaattaaaggaaaggcttcatataccttctagagttacattgggttaccagttacataaagatacgattcagaagactggatccgtctcaaaatattcatatactgtataatactgcagggaattttagatatcacggataagcaatagaaaattcagatgcaaccaatctaatggcacatacttttattgttatacatctaacgtttttaaacttaacttatatatcatacaacaaatcacattcttgattcaaaggtggtataaattgcattatcattgcatgcttaacttttacttaaaaatagtaacacattgattgttgttagaaagctacaaaagtagttccagtatttattttttttgccataacagacaacataatataaacatttatatcactttttgttttctcttttgctggttgatccatgggaatttgcttattactaacgttgcatctggacgattttttggaaatctgtgttgtcaacttaattaatcagttaatgttaacattcatagttaatttgaaattgtatcttctagtactcaataataatttttagtttgaatgacttttttattgttacagaaatttagatttttttttggtatgaatgaaattctacatatttgtttaggttattttttttgtttattttttttaactagcaaaaaggtacatatttatgcttttctgtatttatatgaataaaaccgataaacttgaaaaa

SEQ ID NO: 212 - DNA, 1398 bp, Spodoptera frugiperda
aagacttatattttgctacgttaccgaggaaacacaaaaaactttcacatgatgataaaaactgccatattgtcattgtagttccaagaaaaacttgtataaaatcagttcagtgagctatgatcccattgatagttaagttgaaataacaaatgacttcctttcagatcgacaaaaacgaacagaaaaacgacaacgatttagaaatacccatggacttttctataaaacatcccttacaaaatgcttggactctatggtattatgaaaatgatagaacccaggcatgggagaaaaaccaaaaagaaattgccactttccaaactgtggaggacttctggagcctttacaaccacatcaaaccttcaagtgaattaaggcaaggaactgattattccttattcaagaaaggaattagacccatgtgggaagatgatgccaataaacgaggaggcaggtggctgctcagcttagaaaagaaacaaagaaacaatgatctagatagatactggttagatattatattatgccttattggtgaagcttttgaaaattctgaagaaatatgtggagcagttgttaatataaggcaaaagggcgacaaaatagctgtttggaccgctgatgcccagaacagtcacgcagttctagagattggaagtaaattaaaggaaaggcttcatataccttctagagttacattgggttaccagttacataaagatacgattcagaagactggatccgtctcaaaatattcatatactgtataatactgcagggaattttagatatcacggataagcaatagaaaattcagatgcaaccaatctaatggcacatacttttattgttatacatctaacgtttttaaacttaacttatatatcatacaacaaatcacattcttgattcaaaggtggtataaattgcattatcattgcatgcttaacttttacttaaaaatagtaacacattgattgttgttagaaagctacaaaagtagttccagtatttattttttttgccataacagacaacataatataaacatttatatcactttttgttttctcttttgctggttgatccatgggaatttgcttattactaacgttgcatctggacgattttttggaaatctgtgttgtcaacttaattaatcagttaatgttaacattcatagttaatttgaaattgtatcttctagtactcaataataatttttagtttgaatgacttttttattgttacagaaatttagatttttttttggtatgaatgaaattctacatatttgtttaggttattttttttgtttattttttttaactagcaaaaaggtacatatttatgcttttctgtatttatatgaataaaaccgataaacttgaaaaa

SEQ ID NO: 213 - DNA, 1396 bp, Spodoptera frugiperda
tttaatttatatccttgcaacatcacctccgtctgtctttctttttgtaaaaaaattgttgcatcgtgagattttatgaaacttcacaatggctggtaataatactgaagaagtagagggttctgcgacgacggaaactaagggtacgactaacgcggaggtcccgccggagttcttgataaagcatcctctgcagaacacctggagtctttggttctacgacaatgatagaaacaaaacatgggaggagaacctgatagagcttactactttcgatacagttgaagatttctggagactgtaccaccacattaagctaccttcagagctgcgtcaaggacatgattatgcggtcttcaagcaaggcatccgtcccatgtgggaggatgatgccaacaagatgggcggcagatggctgatcagtcttgagaagaaacagcgtaactctgatttggaccgcttctggttagatgtggttcttctcctgattggtgaaaattttgatcattcagacgaaatctgtggtgccgtggttaacgttagggcgaaactcgataaaattggagtctggacagctgatacttctaagcagcatgctaacattgaaattggaagaaaaattaaagagcagcttggcattcatgggaaaatcggcttccaagtccaccgcgacaccatggtcaaacatagttcggcaactaagaatctatacactgtttagttgctctttgtttgtacactcgatgttaacagttgtatggggtggctagttaaaatgtcttagaatgatattgttggtggcgagtgagtaaggcagataaatcgactaaaatcgctttcctgatctaatttagtcgatttttcatcctaccggcactcgtacgtcttccttttctgttaattcgattttttgaattcgaaaaggaattctggtttacagtgattgtgtgtaagagaagagatattttagctataatatgagctatctcatacattgttgttgtgttttctaaccattgattagctaccaggagttatgatatttaggttgatttaaggagttgtctcacataatttatcttaatataacgtgcatgttacgtctgtggctagaaaaccttaaattttaagtctgacttttgtactaagtgtgcattagttgtaatctatagatgtaattgtgtcgaaatgtgttagcttggttgcaggatttaaattattagtattatataaaggaaataaccgttatttctacatttagcacttattatatattattttgttattgaaaaacacttggcttttaacactgccgttggttcgtcatattgtaacagcatttcaacgatgcaagtatactataaacattaaataccattttgtataaaaattttaa

SEQ ID NO: 214 - DNA, 1921 bp, Spodoptera frugiperda
attggtagtggcacgccgctatctccgttcatttctatcaagttgaaattcgttgcctacgttagcgaatttcactaattttagtcatattttactagataaatgttgtaaaacttagaagaaactcaatatttctttgtctaaaagattttataaggtactaagtgtgttaaaaccgcaattatggcttcgagtgaagggcgaagtgctcaatcgaacttgcatcagcaagacctaaccaaattggatgtaacgaagctgtcggcgttatcacctgaagtgatatcaagacaggcaacaataaacattggtaccattggccatgtagctcatggtaaatcaaccgtagtgaaggctatttcaggagtccagactgtcagattcaagaacgaattagagaggaatattaccatcaagttaggttacgctaacgcaaaaatctacaaatgtgacaatccgaaatgtccgaggcccacaagcttcatatcgggtggttcgtcaaaggacgacagtttcccgtgcctgcgaccggcctgcacgggccgcttccagctggtgcgtcacgtgagcttcgtcgactgccctgggcacgacattcttatggcaaccatgcttaacggtgctgcggtcatggacgccgcattgttgctcatcgcaggtaacgagtcttgtccccaaccacagaccagtgaacatttggccgccatcgagattatgaaactaaaacacatactcatactgcaaaataagatagatttggtcaaggaaggccaagctaaggagcaacatgaacaaatcgtaaaattcgtgcagggcacagttgctgaaggagcacccatcataccaatctctgctcagttgaagtataatattgaggttttatgtgaatatatcacaaaaaagatcccagtcccactgagagacttcacttcacctcctcgaatgattgttatccgttctttcgacgtgaacaagcctggttgcgaggtcgatgaccttagaggtggtgtagctggtggttccatcctgcagggagtactcacagtcggtatggagatcgaggttcggcctggactagtgagcaaggacgctgacggcaagttgacatgccgccccatcttctctcgcatcgtgtcgctattcgctgaacagaacgaactgcaatacgccgtgcccggaggtcttatcggagtaggcactaagattgaacccacgctttgccgtgctgatcgacttgtgggacaggtacttggagctgttggtgctctgcctggcatcttcgtaaagcttgaagtctcgtactacttattgaaacgtctacttggagtgcgcactgagggagacaagaaagcagctaaagtacagaagctgactaaaaacgaagtattgttggtgaacattggatctttgagcacgggtggaagagtaatcgccactaaagccgatttggccaagattgccttgactaatccagtgtgcacggaaatcggagagaaagtagcgctcagtaggagagtcgaaaatcattggaggttgattggctggggtcaaattcaaggaggagagacaatcgagccagcaaagaattaatgttatgttttttatacattgaactattatatgtatttaataaaagcaaatataaatgtaaataaaattattatttaatttcaattaaacttgactacctataaaataaatcaaaattcgagaaatcattttagagagaaacatttcctgggtaaacaatttatttgattttttgttcagttatgcttgcaataattaattttaggccatgtatataaaagtgttgatatcttcatcatctcgccgcatgtatttatgttcgatgagccattccaactgctcttttatcatcttcttagaaggcaggaacatgtttttcaatatctctacc

SEQ ID NO: 215 - DNA, 4157 bp, Spodoptera frugiperda
ttacaactaacaagacaggtgtcagtcaaatgtcaataaaatctgtataaagaaaatagctaaatcctattttgtatatttattgtatattatgggcatcttgcgcattaatacgataattaaatttactttctaatgaatgatcaaatagtaacaataaccacctctactatggcacccgtgtgatcaaaatcaaaagcatttttgcttcattatttttattgtttacttcttaattgcttttcgtattacttaagtttttaatgatatttctaataattacaatactatttgaatagtacataagtataagtgtagtataaataactacaatcaaagtgaaagaactgaagccttgagaacttgatcgatagccttgaagcaccatgaatacagatgaagactctcctactaagaaaaaagtagacaaacaatcaactgataatctaacagtgacgctagacaagatagatgcaaaacgatcggagaaaggtgacgaggaaccaaagccgcgtatcgttttaacgtttcggtcggagaaaaacagtgccaagagtagcaacatgaagatagtgactaacgaggagaagcaggaggaggcgccgcgccggtccagtaggacgcgcggtaagtgggagtgggtgtgcgacagcgacacatctcctaagaagaacaagtctggcacacagacaacatcagaaaatgatgagtctgacagctcacacactgctcccaagcggtcgacgcggcggcgcagcaaagactctgacaacgtcctagccaatgctattgctagaaaggagaaatcatatgaaacccagcaagctcctcaaagattgtctcgcaggataaaacctacagctaagattcttgctaatgaagaattacgaatgggattggaatctcaaaacaatgcgcgtctaggaataaatgagaagtctcctgaggagggggtgaggacacggaggtccgttcgtcctttggcaatagaggtagagaagaagaaggagccggaggtagaagttgaggaggagatggagttgggagaagatgatgatagtcaaagtcagaatactgtgatgaagctgaagcatctgtgtgagctgggtctgaaggctatcagcccagatgaagcagaggaaagtgggaatgaaaacagaggggaagaggatgaggatgaagcggcagaaggagaagaagaaggtgtaggagaagcggatgagttggaagaggacgaggaagtggaggatgcaatattcctcagcaagatgatggagcacgatgactccagtgacgctgacagtgacttccgctgctctgtcgaagtagcagccaagaacaggccgaggcggtctaccagactgtgctcctctatcggattcaatgacagcgatcgatcatctcctgtcggggaagatgaacataagtccccgcggcgctcgtccaaacggtcgaagcacaattacgtggaagacagtgaaagcaggagtcatcgtaagaggaggcggcaccggtcatctggtggtgacgaacctcattccgatgctgaagttgaagatataagtaatccagccgccgcggacgaaggttccgaagctgcttgtccgaccgacgagaccaagataatagcggcctgcttctgtgagacgcctagcaacgtgtacgctgcgcctgaagaacttaccgagccaatattctgccaagcgatagagctggtagacggagtacgcgtagggtgttcccacagcgctcgtcgccaacgcagcctagtgagtagtggcaaccctagtgggctggctccgatggtgcgcgccggccctagggctccatacttcctggcctgcagcctccacgccgcgcagctcgccaagcacatgtgctgccctgcctgcggactattctgcactcagggcatcttctaccagtgttcatcaggtcacttgttccacctggactgtggcttgccttacaacgactcgaagcaggtgcctccaggctgtccgcactgcgggatctcttcctaccgctggaagactgccaacgacagctgcgtcaaggtccaggtcgacatgaagtgcagcaacaaacggatcttcttgcccgaccagagggaacagtgtactccagcatacctgtcgttctccgttcgggagccgaggccggagtccggtccggtgataccggcggacctgctcccctcgccgccggtggacctgaagcagatctgcgagcaagcggcgcaggcgcccaacaagtcgccccaaccgctctgtgacgccatcctcaggggagacactgtacaacaacttattcctaagattgtgtcgagtgcgagcctgaacaagccggtgcctggccagtcgggcgggggctgcgtgcacgcggcggcgcgggcgggccgcgcgggcgcgctgtacctgctgcactgcgccggcgcacgcctcgacctcaccgacacacaacaacgcacgccgctcatgctcgccatactcgcacttgttgagaaaccgaccaagaagaagaaaggcaacaagcgctccaagtctgaggagccagaacaggatgctgacaaaatggaggagagtgacagacaggacaaaggggaggacaagatggatgaaggggaggacagtgtgaggaccaaggaggaggacctcatcaaggtcattcggtacctcgtagccgctgggtgcgatgtcaacgtgcctggtccggacggtatgacatgcctccacatagcggcccagcacgggctggtgggcgtcatcccgctactgctggagcgagccgacgtcgacgcccgggaccacgggggctggacgccactcgtctgggccgctgagaacaaccacagtcaggctgtcaatctcctgctgtctgcgggcgcggcggcgggtgggtgcgacagcgagggcaacggcgccgtgcactggtgcgcgctggccggcgccgccgccgcgctgcgggcgctacttaacgaccacgccgacctcgcacacacactcaacgcgcatggggacacgccgctacacatagctgcgagacaaggtcactatgcctgcgtggttatgttactagctcgcggagcacggacggacatagagaacgcggcgggtgagctcccagtagaggtgtgcacgggccagtgccagaccgtcgtctcgctgcacatgcagatgaccatcgccgtccaggacaacctgccgcggtacaaactactctccagcgacatatcgaacggccgcgagccgttcccgatcccgtgcgtgaacgaggtggacgaggcgccgctgccggacgacttcacgtacgtcacgcggcacgtcatgcccgtacccgtcaccgtcgacaacactatcgacaccctgcagggttgccagtgctcggagggcgagtgcacgtcgatgtcgtgcgcgtgcgcagcgctgggcgtgcgcagctggtacagccgcgggcgcctgctgcccgccttcccctaccacgacccgcccatgctgttcgagtgcaaccagacctgccactgtaacctgcgtcgttgtggcaacagtatagtgagtcgcgcggcggcggcggggtcggtgtgtgtccgcgtggaggtgttccgctgcccggagccccgcggctgggggctccgcgcgcggcaggccgtgccgcgcggggctccggtcgcgctctacgtcggggagctgctgccgctgccgcaggccgacacgcgcgccgccgaccagtacatgttcgcactcgacgtcaagtcggatctactagagcaatgctctgacaagacgcagctgtgcgtggacgcggcgcagttcggcagcgcggcgcggttcgtgaaccacagctgccggcccaacctcgcgcccgtccgcgtcttcaccgacacgcgcgacctgcgcctgcccaccgtcgcactcttcgccaccgccgacatacagcagggcgaggaactcacgtttgactatggagataaattctggtctgtaaaatcaaaatggatgaaatgtgaatgtggaagtgtagactgcaggtatcctactaaatctgaagacacggagtcttcgtaaacccgtaaagtgatatttttaaaatgatttactatacatattggatatttattgattgtaatgaataaacagtgatctgtaatcatgtactga

SEQ ID NO: 216 - DNA, 508 bp, Spodoptera frugiperda
gcgttgcacctggtactccaatttacgagtgtaacaaagcttgcaagtgctcctcagagtgctgtaatcgtgttgttcaaggtggcagaaatattaaattaagtatttttagaacatcaaatggatgtggatggggagtaaaaacagaacaacaaataagacaaggccaatttctttgtcaatatgttggagaagtaataacatttgaagaggcagaaaaacgtggaagggaatatgatgcaaatgggggaatatgatgcaaatggtctcacttatttgtttgatttagattttaactctgttgagaatccatatgtagtagatgcagcacatttaggaaatgtatcacatttcataaatcattcatgtgatcctaatcttggagtatgggctgtgtgggctgattgtcttgatccaaaccttcctatgttagctctctttgctactcgtgatatagaaattggtgaagagctgtgctttgattatctgcaaaaagcttctgacagtg

SEQ ID NO: 217 - DNA, 1828 bp, Spodoptera frugiperda
gcagtccgcgccgcgacacgcgacacagcgcacctctgacatgtgaccgaaagcatggaagattgtgatcttgcccaataccgcgatatgatcatcgagggcgaattgccgttggacctgcgaccgccgccgcggctctacctgccgcactacctgcgggacgaccgcgacgccgactaccctcaggacgacacctacgtctccgtggacgaagacacgcctgaagtgccacctgcctccagcgactcggaacggtacgacgcctccagcccgacggaatccaagccatccacgccaaagaagccgaagcagaaatcgtcgtcacaactcatcaagccgccttactcgtacatcgcactcatcaccatggcgatcctccagtccccacacaagaaactgacgctgagtggaatctgtgagttcatcatgacgaggttcccgtactacagagaaaagttccccgcctggcagaattccatcaggcacaacttgagtctgaacgattgttttataaaaattccgcgggagccgggaaacccagggaagggaaattattggacgcttgatcctctggcggaagatatgtttgataatgggagtttcctgcggcggaggaagcggtacaagcggccggcgccgtcgctgcagcacgcgcacgcggtggtggcgatgctggcgcgcgaggcgtacgcgccgctgctgccgctgccgtgctacctgccgcccgcgccgctgctgtcgctgccgcgcccgccgcccgccacgctgcggccggtgccgctgccgccgcgggtcgcggagaccacggagccacgaagtaagagatctcgaaacggattctcgattgagtccattatcggttcccaggatagttcaatgaactcggagccgaggagaagtgcgttctcgccgctccaccagagcaattgtccgccggacgactgggccagatgaatgtacctaaacgggtacggttccagtccatccccgttctaattcgtcccgtcggacacgtgatcctcgccgattgactgatgtgtttccgataacattgaggtgttcgtaaagtgatatacgctaaacaattgtataaaattatgtaaattacttggaaacataattattgctgaatgtttaatttggtttacggtttcataattttacatttttgccgcgaaatatgtgcgttgttcccagttgacacggtgcagttatttcatgaaataattttattgaaattatctagaatatctttctggtattttttatgaaaatgtaaattattgtttaatcgtaaatgccggtttgaatttaaacataaagtcactgagtttttaaaaacttttatttgattttgttattttaaatgaattgatagctgttttggaaaaataatgttttaaaatcaccaacgagctgtcataaaaatattttcttttcagaaaaaaaagaaaccaatgacaatagaccgttgtaactacatattaaaaaaaaaaacattttatcaaacaaaaatgtaagtacctacagtaaaaaaatatttcaatgttttttttgtttgtaataaaatcgaagagatagtgatctataaataagtctagtcattctatgtacaaagtagtgtcgagttgtaaaatgtaagtattatctaagtcctaatgtaaatattatcattactattgtaatttatgatcttcagtcgacattaaatgcggtgatggtgagaagaaaaatggcgcaatattttattaaaacaaaaataaaaaaaactacaattaattgttctttaaaaaaatattgatacctattcctaattcaaaattcattt

SEQ ID NO: 218 - DNA, 1074 bp, Spodoptera frugiperda
atggaaccgccagacatggcgccaatgcgcggcgagcggggcggttctccagcacgaggcgcacgcgcatctttgccgcttccgcgccgtttgattcgccagatcgcgcggcatgtagcctccagtggccgttcgttgcgacgcctagaggtgtcgggcagggtcattgacaatttcgatgacattgaggatgcatccgacgagtctgacatggaacaaccacaacctgcggtggcttgcggaggcaacgccggcaacctgccgcccgctgaccacgacgacgacctcaccagtttgagctggctgcaagacaggaatttacttagaggaatcaatcttacaaaaagcggagtcgatatggaggacacgaaaatggttgataaccaaattattgtgaagagagagataaaaacaccgccgccagtggctcgagtcccttcaccccctcgcaccccttgcaaggctcccccctcacccccagctaacacgcatacaaagcccccctattccttctcctgcctcatctttatggctatcgaggcagcgccagcgcgtgccctaccagtgaaagaaatatacgcgtggatcgtacgtcacttcccctacttccgacatgcaccacaaggctggaagaacagcgtcagacataatctgtcgcttaataagtgcttccataaggtggcagctgctcctggtctcggtaaaggttcgctttggacggtagatccacagcaccgcgcctcattattacaggcgtttggtaggcaaccaataccagccgtgggcgatgtggtagagaaccctgagccggtgcaagagaatggtacccgagtgtcgctactagcgcgtcgcctggccgacccggagcccggcgccgacgagtacctcgcggccgccactgtactcgccatgaagtacggacccgccgtactcgaccagttgccgccggcagcgcacttggtgatctcccggtgcgcgcgcgacgagcactcgtatagcggcggcgaggagagacgcacggccgaggcactcctcaacctcgccggcgtgcgctccgagcccgcgcccagctag

SEQ ID NO: 219 - DNA, 3819 bp, Spodoptera frugiperda
ttttttaaattgtgtaagaagttttataaattgttatctttttataaaatattttcctaaatttaagtaacatgagaataatctaaattaaaattgagattggtgtcattttagggttaacgaaagaatgcagtgattcagaggtatcaacaacaaatatttaatatcatggcttcctccctggtaggccccaaaccgggtacagttcagaatattaaatactccggttctgatgctgagttttgtacagatgttacgggtgaaacagtaatcatttccagtaatgatggcagtcacactcatggaagttccaaactgaaattaatagatagaatagactataactgggaattccgttactatcatgggcaccttgttgcagctcatattaatggaaaagttattgcatatgcaatgaaaggaaaggaaggtggtatggtgagagttaccaaccaagaaactggtataagagctctaataaagaattttaaagatgatattaaggacattgcttttgcctatataagagaagaaattattttaggttgtgtagatagtgaaggaaatatattagtctacaaaataactgatgaaacaaattcaatatcatctacattacttttacatgtatatcatcatcatcgttcgagtatatcgaaaagtaattatagacttatatggtgtccttatgtgccccctattgacgacgacgaagacgttgatacagtagttgatccagataaaatgtttgtagtactgaatggaaccagagcctcaatatacaatttaagtatgttaagtgaaaaatgtcttgtaagcaatataatcgatcctgatgaaagctttgaagggtacatagaaattaatcacaacgctgaagtactagatgcttcatttgcttcggatggtactcacatagccatagcaactggagatggatatgttaaatttattcaattatatttttataactcggagaagcaaaaatcgctttttgagtttagacctcatgatggtactcctctttcgtccctgatgtttatagataaaatcttggagcccagttcagagtgctggaaatttttaataacaggagcaaacgacaattccgtaataaaattgcattcttgtgaaacttggtcctgcttacaaacaatccactttaaaccccatcccaattcaatatctggcctgtatctcaacgtgtcaactgattataccggtcaatatctattagtatcagatattaactacagagttctgtatgtgttagaattaaacagaaatgacaaagaacaaagggtgcaagtcacaaggatggcggggtttttacttccagcccctttcctaagttttcacatattagaagctactagtcgtattatgccattttcatacaataatagtacggaagacgaattttacgaagacagagatgaatttgatgaagattcagaaagaacagcaatttgcttgaaaatgttagttatacaacctaagaagttccaagaatgtaatatagttttcgaacctgaaactatgtcttataattcgttaaataattctgcagaagtgatggagaaaaccgaaaaattccccaaattggacgatctacaagaatcagtatctttgctcatacaacaaaaaagcagttcaaatttgactttaatgacaccagatgactttacaccttcagggcgcaatacacggccgaacagtgttagaaatgataccagcaattctttagaagcatctatagctgaaataaatgacgtcgtcgttgataatcttatagatttccaaagacctcagaaagacaattttgccagtggtggttctagtccgagcagagaggtgcaagaaatattatctttgaataattctacgtacagcactcaagacttctttgacaatcttcccaagcttcaagacaatcaagaggagccccaaaaagactactcaaatcacactagccttaactatccggacaaaataactaatgaatcagttgtaaaatgttggcaaaatgtgcctgtggttcaagaaaatgaaattataaaagacgaagctctaagaaaagaattaagattaagtgctggcgatgaaaaatcacagttccaactactagggtatcgtattaatgccttagaaaacatagtgcgagaacaaaacgttcttatcgaaaaaatccatggcgataaaaaagaagtggatttggccttatcaaatcaacaattacaaatcatgaagatgttagaaacgctcgttaccatgcagaaaactactgaacgagatttacaagaaaacattttgactggggtcagtcaaattttcacgaaatccttagcggacaaggtacagcagatccttgcgagtgaagttaaaatggttattttaccagctattcaaagtcaagtggagtcatacagacatcagcttgaaagtcagtacgctcaaaaaataagtcataccgatatgatgttaagggataatatcgcaaaagcttttaataataaggcactggcagatacccttagcttgtccgttgtaaacatcgtagcacctagtcttgaaaaatgttatcgggatataatttcttcatctttaataccgtcctgggaacgagtatgtggacaaatgttccaacaaattaacgaaacatttactcgaggtaccaaagaatatactgcatcagtagaaagctacatggacaaacaaagaagagtgcaagagaagggaaaagatttgatagtacaaatgcaaaatgtctcagaaaccatgaaaaccaatgctgacaaattaactagcaatttgacgactgagatacataaacagtttcaaacggtttttaaaagtatgaacgataagcttacgagtaatatacgagagattgtgatggaacaggtaaaacaaggattcaaaagtcacgctactgtcatagaagacagtgttatgaatgcagtccgatcaagggcagttactccatcaccacttctggattctcatgtgactaccatgaaccagattcaactttttatatcaagacacaattataacgacgcctttcaaatagcactaagcgctgaaaatttggcttacgttattcacgtgtgcgaacgtgttgacatacaaactttgttcggcgaagaatgtcttttacaacaaagttgtctgctagcccttatccaacaactgagcttggagttaaataagaatacagatctgaaattaagttacattcgtgctgcgttcctgtctttatcgccagattgtacagcaacaaaacatttcattccaaaggttttgaaagatttgttaaagcagctgaacctctttattcagtcgaatccaccaatgaaacaattaaaagaagcaaaacttattaaaatggctgtggaaagcatgttagttaagtgatatatgttatttttatactattattgtaaaaaagtcttgtttattttcttgtgtattggtatttgcgtattattttttgatacgtttggcatatggctttacatttcaatagtctctcactaggaatatcctatccctgaataataaattttgttttaaaaaacaatacaaatataacaagtgtaaaaagtcccacgactaactagagtctgaataatgtgttcaccgtgtcttgtttgagtgagaaacgcatgtgggttcatctccatgtgtgaattcttgaaatgaagcggcacatttggtcgtccaaacatgttgtaaaattcctgtatattctttgtttcttgaactattcaccaaatattatatacagagtgggccaaacaaaagagtccacctcga

SEQ ID NO: 220 - DNA, 8534 bp, Spodoptera frugiperda
gcattctcatgtcggtcggcatcagcggtttgctgttgtaatatttgcatgagtttttgcagttacgattctattgtgaatttgtatcaaactttttgaaattcatgtggaaagcggaagagtgaagcaacaatggcacccacaacgctgcttccgaagctttcggatgctacacaaacgatatcattctcggatggcgatggagtgtgcagtgccgaagtgttttccaccaacgtcttggtgaataccaatgctggtaaccacgaccatggtagctccaaggtgaagctcaagaacctggtggattacaactgggagccgaagttctactccggacaactgctggctattcataccagcgggaaatatttagcctattgtattaaagctccgaatccggtgaaccctggaacatggagcggtatggtgcgcgtcgtgtacacgccggagcccggcaccgaccgacgcgcactcatcaagggaatgaagggagaggtgcaagatctggcgtttgcccatatccaaaaccaggtggtactggcatgtattgacgaacagggcaacttttatgtccacgaaattgaagttactgacggtgggttgagatgcacgttactagcggaggtccgcgaagacacgggtgcagtgggcacctcgcaccgcgtagtgtggtgtccctacatccctgacgatgaggacgaggctcctgatgacgacgtggctagactgctgcttaccacccatgataatattgcgcgcatgtggaacacgcgcggtctgtcgggcagcgtgctggcgtcggcgcgcgtgggcggcgcgggcgcgctgtgcgccgccgagcacgtggccgccatcctggacgccgccttctcgcccgatggaagcgcgctcgccaccgcctccgcagacggatacgtcatgttcttccaggtttacatgcatgcagacagcagtccacgctgcctccacaagtggcagccccacggggggaagccactcagctgtctcttcttcttggacaaccacaagaactataatactgacgtccaattctggaaattcgcggtaaccggtgcagagaacaacactaccatcaagatctggtcatgcaagtcctggacctgtctgcagaccatctcgttcacccctggtctgggcactgaggccagcctcggcctgaaagccatgttggacacgagtgccagctatctgctcctctcagacttcaagtcccgcagcctttatgtgctgcatatggcccgtgaccctgaggataccatggcctactgtaagagtatctccgagttcctattgccataccctgtactgagcttctgtattgttgatgcagaggaagtgcaaacaaaatgcgagcccagctgtgaggagaccatgtatcgcaatggatcgagcggggacgcggactcgccgatacattacgagctgcatcatgatgaggaggggtcgggcgagtgcagcgcggagtgcgcgcgcgtgtcggtgcgcctgtacatcgtgcagcccaagggcctgcaggagggacgcctcgtctacactccgccgagacctcctctacatgctgatctcatgcatggtttgtcggagttggctctagaggacagctcctcggagtctgtgcctgcgactatcgcgtctagcatcttgcaacagcagagccaacaattgaagaatttgctcatgaggtctcagactcagcccggtagcctgattggcactcgtcctgagtcgccgtctatggcaccccagctgaatctcatgacgccagacgctttcagttcgccaggcaagcgcgaggaagatgacccgccactgtccgctacgcctgatgttagtaagccgcgcagctccactggaggtccgtgcgaggagtctctggccgagacggccggcaagctggcgtcggccggctccagccccagtagggaggtgcagcagattatggcgcacaacgaccatccattcttcaaggaggaggaggtagaggagccggtggaggtggaggaagggccggcgggggggacggacgagctgtacgaggcggcggcgctgtacgctgccgacgatgtcttccccgagccggcgcaggcgcagcccgccccgccactgcccgcgctgccagcgttgcccgcgctaccagcattgcccgccctgcccgccaagctcgtgcacaccaacagcgacacttggccgcagatatcggtgccccagatcgcggagggcgggcgcaaggcgtccagcgacaagtcgggcagccagtcggccaacgcgtcgctcaacttgtcggccgaccgcggcgaggaagtccgctgcgccggcctctctcccgctgacaaatcacggcttgaagcactcgaacataagctcgataaacttactgagatgctgagcgtgcagacgcgcgagctgcggtcgctgcgcggcgccgtggtgtccccgcgggacatcatcgacgaggcgctgcatgcgcacacgcagcgcaccacgcaggccgtcgagagcgcgctcgccgacggctgggagcgcatcgcccgcgtgggcgaggcggcgagtgcccgcgcggcgcaggcggcgggcgtgggcgcggcgcgggcgctggagccgctggccgccgcgctgcaggccgagctggccagcaagctcaccgccaccgacatactgctaagggagaacatcgacaagctcgccaacagcaagactataatggagcgtctaagcacatctatcgcgaagtctctgtccgacatggtgcgggagtcgttccgcgaggctctcttcgacagcgtcattcccgtcatggagaagacacacgctcagatcttcaagcaaatcaaccaggccttccaaaatggaactaaagaatttgcggcgaacacggaggcggcggcgcgcgcggcggcggagcgcggcggcgcggcggcggcggcggggctgcgcgccgcgctggacaggcacgctgaggcactcaacaacgccaccgccaacaaccagcatctgcacatcgccgacatcatacgggacgccacgcacagcgtactggagaaagagctatgctggtggagggaacaggcccgtggcgtagccctagcctcgcgggcgcattccccatctacgccgcattcacatcatgcacacgatcgtcagatgcaagtggcacaaatccagtccctgatcgctagtggggacgtgaacggtgcgttccaacaagctctatcagcgtcagaccttgctctagtagtaatggcatgtcgcgcggccgaacccgcccaggtgtttgggcccccgtgcaagctgaaacagcacgtactactgtcgctcgtacagcaactcgctgctgatatggcgcgggatacgccgttgaaacacagatacctagaagaagcagtaatgaacttggacacatcgaacccggtgactcgggaacatttgccagcggtggtacgggagctgcagaagcagttgatgtcgttcctggcggcggcgcccaaccacggcctggcgcgccagctgcgcatgctgctcatggccaccgaggccctggtcaaggcccacgcctgaccgctccaagcgcactgccgcaggccggcaaaacggtaggccaccgcctccacgatctactgggactgctagaaaactataatgcactgtgaaatacgtgaaattattactatacagtttccaataatgttatggtgttctaaaacatacgatctcaaatctagtacaccacacaattaaggtggtaatatgatggcagttctgatacgtttctaaaggcagtgttatagtatagagcaatactcaagtcaaaatcttttctcaaaaagagttaaaacgtaaaaaaaccttgtgagtgaataggttcctccaacatttcttatcactaggcgagaaagccaacgccatcgtataaaatatataaaaagggatacaaatacattcaagacatatatgtatccgtttccagctatgcttgaacaaaggtttgagtatcgttctataatacgagcctcagaagttagtctaaaaaatgtgatcgtttctataaatgattctggaagtaattgtctattgttaagttacatttcactgtgcattaattacgttaagttttctcttctaagtgagttttaagtgatttttttccaatgataatgttgattctaattatttacgactaaaatgatgttaatacagcatttttccaaggattgattgtactgattatttgtacttcatactaatgtttaaagattactggaaacttgcatcttatttagcctcactttatggaatacacaatgtaatagggacgtaatatctgaagtaaattaattttaaataaacatataccaataacaccaacaaaaatatttccataattagaaagctgacgtaataatacgtttaattagatttttactttttctacacttagattctttaacttatttgtcaaaaacgccatagtgattacattgcatatcatatcaaattgtgtacctattacattgtgtattcaaaacaagaaataccagaaagcataccactttttggaaaacaacccaaatcaattatatcttgattaaaatagtcataaaaccaagatcagaatagtcactaacttcgtgcccgaaataagtggaggtttttaaaaacgttatgaaaccaaccagtagatcgatggcgtcggcccgtagacagctacattgtgatattaagaactatgtgtttgaaagttccacagggaatactcgggttccctaagtttttttttatatttgactattttgtaaaacgtgatttttatgttcgggagcgtaatctccgtctgatgatacatgtttgtgattgaagatgatgctgagaattctgttcttagacgtaagttagtttagctaggtggtttctgtgtaaaatggtgattcaaattgagattatgatgtatgtgactaagtattcagtgtatattggcttgatatggcatgaaaaccataactggtgagaagtgagtgttacattagcaccatcttttcattatgttactgtattaataacctgcacaattttatgttacactgagttcaattacctatgcaatcatttgtatatggtgcatattcacaagctttaacatagtcacccatatgtttatgacttagcccatgatctcctataccactctccacaataaattatccattttacacaagaccaataacatttaaatgccaatcatacttacaatttagtgtataactggtataaagctataatgtagaaagtcgcgctattcaaagagctgtataaatcaaagactgctatcatttcatataagtcgtagaagctcttatagggtttgtttcaccacctctattcattagaaacctgtggagatacatttggaaaggggtttttctatgatggctagattcatctaagggcgtagtacgagtttgtttgacgtttaaagagaaacgagaccgcgtttgaagctctgatgcctgaagctgatcacggcttcaatgaaataaccaatcagaacgccaaacgcggtctcgtttcaatctcgttcaacgtaaaagaaacttgtactaatccctctggtatctagttttaggtggtgaaaagccagtgcggtgctagtcccatttttattgacttgactgaatgtaagaaaaaaaacaatagaatagtaacttaggtactttcacacacggatgaagaggaaagtcctatacaaattagacattgatttattagtatcagtgctaaatattctgtgccaccttgtaaatagtgtttagtaatccttatacgtacttatgcgatatgctcgttctcttacaaaacctctgaagtgctcccttttctgtacaaaaggccagtgacgcatctgtaaggcgttgcgggtgtcaatcgcttaccatcaggcaattgttctgctcgcttacccctgtcccataaagctcttatcatactgattgctgttgacagtttaaaatcaacttacaattgagtagagtatatcgaataagcctgatttcaatcaaaagtcaagaaaaggtgtcaacaaactgcaaaattacataattatattaataatagttgaactagataacactattcaaactaaatacaatgtcaaacataactattctaatcagtagatattccttttgtttacgcctactttttgactaatattttggtaagatatcatctttttcactgtatttcccatagaactgaagatgatttgtctaaattagtattggagatgaatgaccttaccaaggtctacacataagaataatccactatatcgttactatagaacgctttataaaacatagtatatgatatatcaaatacaattattataaaaacatatttggaaggaaaattattgaacatgtgcatgttataaattttagttttgcagattatattttaataatgagagatattaataaaaagtaaaaagagtaattagattaaaatttaacgtaaacgctcttagctagatttagagagaaaaataaattaacttttttataaaataaacttaaaaacacgtttatacctcccgcgtttttggctcggcaagcgagtaagcggtgggatgacaattattgtgatactcctagtttatgctgtttgtaattttaaagccaagctacttcagtcaaacatgatggtcttcataaaaatcaacaaaacaaaaagttaaccatgtcccataaaacctaagttgtggtctataaaaggcatttagattacaactgtcaaattgacgtgaacttgtaaacgtcaaaattcccgccatttcccaatatttataatctgtaaaactaaatgattggaaaacaataacacgaaaatagcgagtaatgagtatttaatgattgtcatgtaagactgtcgcaatttaacgttgattgcctatgattactcagtaatataattatataggtgtacaaaatacgggaacctcattttatagattaattaagtagttagcacttaggctatgaataagtactgagttagccggtagacatttggtttcatatatacgacaaatggggaataagcaagaaaataagctctaaaacattattaaaatgacgaatgacttattaaacatattatttactggagacatctcattcatatttatgataatgggtgacccctagcattaatcgggagccctgaaaatcgttaataagttgagatgtattacagtcgaggctgtaaatcatctgcctctcttgtgccatttggtccactaaattccatgcttccagatcatttcgtgtgttgccctagtaccaattctcaaccaccccctcccctttgcatcccccatccctaatccttatccccaacttccctatcaccatacttcatttagaggaccataaaacaaagcagttatagaaacctatgcaaattttcatcccttatcgtgctttaaaggcgctacatgaaaccttatgtcaataatcttgctatagatttggattatttggcattgaaacttttaattaagagtttcaatagcccgggaataaatagccgacaaattcggtgatatctcccacgaatggtactggactgtaagatactaagatattaaacttaaacatatgctagtctagttttatatgagtgaaatgaaaggtatatgaagatttttctatttgactgtcattttgtatgtatgtttgtgagccatacatgttcttgcgtctaaatctatagcatcccggctaccaaagcagccttaccgcttattgttaaaactatttaatttccgtagtgtacggtggacttgtgtatgtatggactcgtcacattcccgactattcaagtgacactcaataattaaaagctaataaatgaacctgagcatcatttgagtatttgggagtttatttctcatgaaatgttgaacgttttatgagaagttgcgcgtttttacatctttataatgtttgtcattatgtaatttgtgtatatcacttattggcttagcagctatttttgctgaaatatgttcagactcctcgctatatagagggatatcgcattgatgactaattcgtgtgtaaatatttagttgatagtttctatacttttctatacttgattattgtgattgccagacaaatgtcacatgattgcgattagctataattattgtatctttctaaataacttagggtgttaagactcctcaacctaattcggttaattgacattattataaacttatattatgtttgactgcttatttcacagacttcttgatttcaatttatatgacttatactcttgactatattattggtgtttatgtattggaaattcgtaaatacgcgagtgatgagtcccgcgttgttttttttatatgattatttttgtcggcgctttatgtacccctgacattgatagtattactctaagaaatacgttatatcaataaatgtgtatttgatttgtattaa

SEQ ID NO: 221 - DNA, 1430 bp, Spodoptera frugiperda
  misc_feature (1403)..(1418): n is a, c, g, or t
agtgtttgcttctgtataaatcttcttcattgtcaatccaaaatacaaaaaatagtggcgtctattaggaaaaacattttattatattatagagtgtttgttttaaggctcagtatctctaaatagaaataataaggtaatcatgagtaaaagaaacagtcctgttccggaagaagaaccaccagccccagaagagtatgttgtagaaaaaattcttgatagtcgtattaatgatcatggtattaaagagtacttcttaaaatggataggctatgaagaaaaagacaacacctgggaaccagaaggtaacttagattgtcctggactaattgaagcttttgaaaaggaaaaggctaggaaagacaaagaaaatgagagaaaacgcagaccaagcactttaacagaacaaagatcagtgaagaaaaaaactgacgacaaaaaatcattaggcttcgatagggggttagagccagagaagataattggtgctactgatagtccgggacaattaatgttcctaatcaaatggaatggaaccgatgaagcagatctagtgcccgctaaacaggctaatataaggtgtccacaggttgtcataaaattctacgaagaaaagcttaaatggcatgcgccctcgctagaagattcaaaatgcgagtagatgtaatgtttagattatattttaggtttttaatcatgaaattgtgagaagttttaaccagtggcggtttaacctaacttcgggccctgggcactagagatttagggggccccttcattgctattcgttgtcaatttttttaacaaaaaaacacatgaattaacctgctttattgtaactataaacgtttattgtaaaacccatacatttttaaaaataaaaaaaaagatttttaaaacaaacgagaaaaatagcaaacgtaaaaatattctaaaaaatacatttaaaaatattaaaaagaacagaaagttctacagaacaacacatgacaaacaaaaaatcatattctaaaaaatatataagacaaaaatttgctcactttttttcttgactaggcattagcaaactgccatattaatactatcaaaattcagttgctccacttcttcattttttataatacggtagtgattatgcgtctaggttttcttgacattcttaccttcagtatatgtatctttattctttttaaagccaaaaaagaccgctcgctgacgcattagaaattggtatcgtcaaataaacttgcagtgaagctaaaaattggcaaaagttgcctttatatcctggatgacaccaaattttcaaatgtattcaaattttggcataacgttataaaatgaataatttcattatgcaagttctctttgttgttctgaagctatttccttgtggatttttnnnnnnnnnnnnnnnnatatgggaacaa

SEQ ID NO: 222 - DNA, 1914 bp, Spodoptera frugiperda
atgactatattattgtgtaggtacctaggtaaagtatggaacgcatggcggcggcggtacccgggtaccggtataatacccatagtccaaacagctcaccacgtgcgccttggcggcaacgacgttgccgtggagacgcgcaggcggggcgcgggcgtcggagcccctctgtctccgcccgctagcggtggcccctcacctcaccgcgcccgttccgatcgcccgcccgtcgaacgcaccgaccggcgaccgaccgaacgaacggaactccgctcagtactcgctacacgcgcgcaccggtttattccgtgtgcccatttttcataccgtaaacgccgctcgctcgaggcccgaattcccatcgccgataccgaactatttaacatcgcaacatggacggtgacatgtcccaagatgcttccggtgacacttcaccgatttatgaagatagccggtcatcaaaagttctcatcagtgggctacctctacatatccgcttcgacaacatcgaaccgctgctctcacagtatggcaacgtacaacactgcgacaaagccaactcgcgcgatgccaacacccaagcggtgttcatcactttcgagactccggagcaggcgcagcaccatcaatggtttgaatggatgcgagttagagggcagtcggatgaaggtagaggcagctgagcaaaacacccgtggcgtcaggcgcggacgccctggtggcggccgcggcggcggcggtgccaccggtggcggctcgcgacccaccgacttcccattgcggctcctcgtccagagcgacatggtcggcgccatcatcggccgccagggcagcaccatccgcctcattacacaacagagtcgtgcacgcgttgatgtccaccgcaaggacaacgttggttctcttgagaaagctattaccatatatggtaatcctgagaactgcactaatgcatgcaaaagaatattggaagtcatgcaacaggaagccaacaacaccaacaagggtgagattagcctcaaaattttggctcacaataacctaatcggccgtattattggcaaaggcggtaacactattaaaagaatcatgcaagaaactgatacgaagattaccgtctcctccatcaatgatatcaacagtttcaatttggagcgcatcatcacagttaagggcactattgaaaatatggctaaagcggaatcgcagatttcagccaagcttcgccagagctacgaaagtgatttgcagatgctggcaccgcaaagcattatgttcccagggctgcaccccatggccatgatgtccaccggacgtggattctgcggcgctcctccaccattcccgcctccaatatacgctcctctgccgggccagggcggggcacagcagggagctggcgactcacaggaaacaacttacttgtacatcccaaacaatgccgtgggcgccatcatcggtacgaagggcctgcacattcgtaacatcataagattcagcaacgcatctgtgaagatagctcctctggagcaagacaagcaaggcgagaaccaaagcaatccccaacaggagcgtaaggtcaccattgttggcagccctgaggctcaatggaaggctcagtatctcatcttcgagaagatgcgagaagaaggtttcatgtcaggctctgatgacgtgcggcttacagtggagatagtggtggcttcatcccaggtcggccgtatcatcggcaaaggcgggcaaaacgtacgggagctgcaacgcgtaacaggatcgctaattaagcttcccgaacaaccacagcagcagcagggcggcgggcagcaacaggatcacgatacaacagtgcatatcgtcggccccttctacagcgtgcagttttcggcacatgtgttgtactcgtttaaacagtaa

SEQ ID NO: 223 - DNA, 2832 bp, Spodoptera frugiperda
actttataagcgttgcggacgtggtgtttaagacttttccgcaagttatttgttgattttcgttaattttaagtacctaatatcatttaattatttaagactctaacatgtcgacaacgggtaaaactcctcccattaccatgagcaagctttatgttggtaatttaccgaatgataccagtgaaaattctctccggcaactcttcactgaacagaatttgtcttgtacgactattttgataaaacgtggaggatatgcttttgttgattgtcctgatcaatcatcggcagataaagccatcgacaatctaaatggttttacttttaatggtgcagctttggttgtggagccttcagtggcgtctggcaaaaagaaatctctttctggaaattcagatactgcaatgcaggtcggcaacggttggatccaaacgtcaaaaatcataatatcaaatttgggtctacatgtaaggttcgaggacatcgaacacctcctcaacgaacatggacgtgttgtatcgtgtgacaagttgacatcgaaagatcagaatacacagaccgtcgccgtcacgtacgacacccctgagcaggctcagatagctgtaaatcagttaaatggtgttgaagtagaaggtaaagcattcaaagtagaattggctgtggaaaaacgggggaaacgtaatcctagaggaccaggtgctgcttttggaggtctacccggacaaaacagacaaactgacttccccttaaggatattggtacaaagtgatatggtaggagctattattggtagacaaggttcaacaataagacagataacacaacagacgagggcaagagttgatgttcatagaaaagataatgtaggttccttagaaaaagctattactatttacggtaatccagagaattgtacgaatgcatgtaaaagaatcctagaagttatgcaacaggaggctaacaacacgaataaaggggaaatttctttaaagatcttagctcataataatctgatcggaaggataataggaaaaggaggtaataccatcaagaggataatgcaggagaccgataccaagattaccgtatctagtataaatgatatcaattctttcaacctagaacgtataattactgtcaaaggatccatcgaaaatatgagtcgcgctgaatcccagattagttctaaattaagacaaagctacgaaaacgatctgcaggccatggcaccccagaccatgatgttcccggggttgcatccgatggcgatgatggccacagcaggtaaaaacaacctaggaattggttatggttcaagaggactttattcaggtcaagctccttaccccggtatgtaccccgcagggtcccaatctggtggcgatacccaagaaacaacctacttgtatatccctaacaacgctgtaggcgctatcattggtactaagggatcacacattagaaatatcattcggttttccggagcgtccgtcaaaatagcacctattgatgaaaccaaaccacaagaaacacagaacgagaggagggtgaccattgtcggatcaccagaagcacagtggaaagctcaatatttgatttttgaaaagatgagggaagaaggtttcgtcgctggatccgacgatgtacgattaacggttgaaattatggtaccaagttctcaagttgggcgaattattggtaaaggtggtcagaatgtaagggaactgcaacgtgttaccggcagcgttatcaagctacccgaacaaggggcgtcgccacaagaagacgaaacaacagttcatatcataggtccattcttcagtgtccagtctgcacaaagacgtatccgagcgatggtcctccaatcagtagctcctccacagggcagacagcgccaatcaaagcagaaagataccagtcaatcggaagctacctcatccgagccacaacagtagtactaactagagcaacattcatacacactgcctgtgcgcatgggtttgtttctgcataccctattttttataagaaacctctctcgatgccttccacttgtaccatgttgaagattatttaaaagcagcgttcgagcgtcgacctggctgctccacttggttacgacaaagaaaccgaggcgtcggtgaagccccctagttgcgcaaagcgttgagtttttcgcgataacttctttttcatgtcaattattttttgttttctcaagtttttatttttcttgaatagttagtttgaatagtttataattcagttgaccatattatatatatctataggtattgatagtggaaagttttgagaactctccaggaataaggtatgcgtcgaactacgtgcctattgaactttaatctacctcaaataatcaaaatatattagattttatagccactgaaatttccgttatttacacacaattaccgaacacacagtatatatatcgtatacatttttgaaccgaaaatgaacatcaacattcctaaaatacttccatcttttgatttttcaatccagtcacataaattgacactagtattatgtttattaaccttaaaataatcgcttttttgttttggttacactgtaagtcgtaagaattaagaatgtttatgtccgttccggttccccttaatattaattgtggatttttaccaaagaaaaatcgcaaggaatgcgacctaagacagatgagtcgcattctaaaacctcacatcccgatgttcgacgatcagccagtcacaattgaaacaaaaatctgaaagaatctgcactacataaaaaataaacaaaaaaatatacgaaaaggcgtacagttcc

SEQ ID NO: 224 - DNA, 5692 bp, Spodoptera frugiperda
cgaatgttggcgaccgtcatggcaatctgtactttgcacactgctgctctgaaaaaatttgtggttcttgtgttgaaccacgtacctagatttttcagccaggaaatcctttgcctttctggtcctcgttttcctgctacttttccctgcaagattagttgcagcagtccatttctttcgctgttcctaatggtgcgaccggggtattcgattttggctgtttttattgtagttaacagctctttttcttaatgtattgttaataaaataccctgattagtaacgtggtcggtataagatatcttcagaattcaacgataaagccagatttcgaaaacctcaatttttttgcaggtggagtctgtgagaatccacaactgaactcagtgcaacagtataggaaagatataacatcgaagtaacctgatttttctggtttactgtaaagagaccgaaatcattagaccgaaagcagtagaccgaactcattagaccgaaaagcactagcactttaccgaaacctcactagaccgaacagcagaagaccgaaaagcagttctttttacttgtcgcagtaaaagagataagactaatgtaattacaactaaatgttatttggatggttattataaacagttaaaatggtgttaacgtcactctacccttaatttatttttaccttcactaatttgtttaacggatgaaaattatttcatatacagagtaacaatttacatagtctatatataaaataatacaaaaaaaatacaacaaacaaaaagacagatatacaaaatctttaaaaagcataatttactgcaaactttttaaatttatttaccatttcggtctaatgctgttcggtctattgaggctttggtgaagtgcttttcggtctactgctttcggtctaattgtcgtgtaccgatttttctgggaattgataaatcatgacatttgaataacttagccattttttgaaatgcagatctttctttctccatcctttatttgattacaagggacctcttttggctaaatgagtagatgttttggcacttaatagcagtatttcttaagttaaatcatctttaatttcatatataaaaaaagtacagcaagtataggtaattttttaagtacattttcaagttaaattatcaaatgagactatcgatagcagcttaatagatttaattttgtaaactatgtgattttatttgaaaatttaaaaataacaagtaaaataattcgttttagtatgtttcttaattaacgaataatatttttgatggcagatgcatacatgttcggatctctgaatgaaaaagagctacattgtaaaacgatttactatccttaacgtatccatgttaattttatgatgtagcggatatgtggtgttctcgtatttgtttatttatcacgaactgataatcttaagaattgccaattgtcttgttttcgcagtgttctggcaccgtttttgttttatattgtggtgtccagacggctgccgcatttgaacaggacaatgatcatcattttcacaataatatttagatcgcagggcaatggatcatagagtaatatcaggtttttacttcaattgatttggaatagaaacaaaaatggcttttgtagaagcttcagagtcattaacttctttattttttgggaataagccacaattataattaaaaaactccaaaattgctcttataatactgtttccaaaaaatatagtagttaatgaacaaattacacaagaaagtagctccagaactacttaatctgttagtttcccgcaaaaattcatcgggtcggagatatatcaacggaatatactatcaaagaataagcagggtgataaaacgtcaatgtacattcacacatacatacacacacacacagtataacccaacctgggaggcaagtaggactaacgaagattcgaacatttatgacttgtggcaaagaagggtagtatctgcgctttccctgccgattcatcgttttcagttctttttcctgattggtgtctcttgtgaaatatgtccgctacaaagttgggtacttctgatactgcttttaggctgtgttgagccgtttggatcttttttctgtttgttttacagttttggccctcgggctgctgacgcatatgttagattatcatcaccagcccattttaagtccactgtaagacataagcctctgctatttttatccagagatccatactgcacagtcttatgcagtattgatcccatgtttcgtcatctttcatagatcatcttgccaacgtgtatatggtcttcctctgtttcgtttgtctgatcttggcctcattcagttcatttgcgtgtccaccttccattcttcatccttgccagcctatctccatttcaatttgcaagttctttgtccaaaaaaaatctgcaactctagttctgttcggtaggtctttgtttatgatcttatcttttattgttatttctatcattggtgtgtttagtagtatttattttcggccagaatttttttggtgatcaaaaacacaaacttgttgatgagttgaaatcgtttttatggatatagagatggaacctcaagtaatgacaaataataaattaaatttactgtcagacactatgttttatgatattctctctaaaaaatcttacccattgagtaactacagaaagcactcagagaaggataagtctgaagtgttaaataataataaagaacttattaaattagaatcagatatgggaaatctagaggtaataaatccgaatgttacattggttagttttcccctaacaatgatgcctccacctccccacaaaattgtcaattacaataacaataaggtaaagcagaaagcagtaccaccctagagactcacctaggcaacgagataattatagacctatatccccaaaaggatatgacagtgatgaaagctgtacatcatattcttcaagagaaacccctccggaaagcagggtaaaacataccaatttaagaagtactgttagtagagctgatgaacaaactatagtagtaggaaaatattgtcacaattctccgaatgtttaccattcatctaatattcactatcacgtacaacataatcatagtacacacaacagtaatgggcattacagtaaaaacagatactataccaacagtaacaataataaccataaccacaaccatcacaattccaactccaacggccgtcagaaatacaacggccattcgaaaaataatatggatacgatgataaagagggcgcacgggttagtggaacgattcaaatctcgcgcggaaatgttgaaaatagagcccaatccgctcggattatccagcggcggaccgtgggaccaactcaatcaagaaatttgggatctttttattaatagggcgcaaaaggagaaaacatatgacatgaaaattaacttgtggaaaaatctatttttatatataaggaagtgtttaagcagctatggtttgtttatggtcggatccaccatgtcgggattcggtttggagagtagtgacatcgatatgtgcttgttaacgaaaccttgtactaacgatcctcgattagattctctacaccaccttgatgcgattcgagaacttctagtcaaaaacgaggtgacggcagatccggagttaatattggccaaagttcctattttgaagttcaaagataaagaaacaggatttgaaatcgacttaaactgtaataatgccgtgggaattcggaatactcatctcttatatagttatgcccgtcttgattggagagtccgtcctctggtgattattgtgaaaatatgggcccaagcaaataacatcaacgatgctaagaatatgacggtgtcgagttactcgtgggctttgatggttatacactacctgcagcgtggagtagttcctccagttctgccctgtctgcacggattgatccccgacaagttcaactctttcacggaaaaccactcgatggacgtccaagaagaactccccaccatcaaagatttccaatcggacaacagcctaaacctagcggaacttctcatcggcttcttcagatactacaccaactacgacttcaaccactacgccatatcggtaagaacgggctccagcctgcccatagatgagtgtagattcacgaaagcccccaaaaacgatccacaccagtggaaatttctatgcatcgaagaaccgttcgatcacacgaacactgctcgttcggtgttcgatctggaatcgttcaagctcattaaaaacagcattacggcctcgtacgaaatactcgtcaatacgaaaaatctttgtagcattctccctgtgaacggaaaatccgaagtaagatgatacagcgacagttttgatcaaattattttttactaaagtaaaatcccgcagatccttaatttactattggagtaaatctttctgtcttttatatacagtagtacttatttcaataccgatatgtgataatagtattttgattctggtttctccccttcgggttgtgaattaaaactgttaaagtgtcactcgggatacaaatcgataattttggagctctcgtgcaattactattgataatttttgaggaactttgactccgctgaaagtcgcaataattgtagtagtaataaaagacaatcttccttttaaataattttaataaaaaaagccactttactttatcatatattacatatcaacttaaaatataatacttaatccattccgtcaaagcttatttcgcaaaattaccccgcgacaagacattttcaaaacgcctttgaaaatgccctgcaagtcccaagcaatttgatctttataggttctacaaccgatttcggaatcattgtcggtatgtcttcaaatgaatcaaaagattgcctctcgtccgttggacggacagccgggtgggcggcaatctataaatcgcgcttaagtgtcaatgtaatttttcattaatcgttttaaagcatatttaccctatacaccctacacaataggtaaagccgcctctgagtggcagtctattcatgctgaaatgacaaaccaaactaaaacataaatcacttggcagctgtcataatggccgtcagttaaaaacgtgttgccaactcacatttctatacctctaacggccggtttcacaaagtaaagttgacttgtggttaagagatagcaaagtaaagttaacttgtggttaagagataaccagaggttaccccaaaatatgcgttttagtttcaggtcaacggcgaagtatggttaactcacagaatttttaaccagaggttggagtgggttacccttatgggtatacccagaagggtaacaattatgaaactgaaacgcatattttggggtaattttgaggttgtctcttgaccacaagttaactttactttgtgaaaccggccgtaagagttagatattaatgtgtaaaaggttctgtgtgcatttttaataaaggttctgagaaaaaaatgctcttatttttggtcttctaaagtgtactagtaccttaaaattgctgttttaatttaaaatatgtgtatatttttacaatatctaattttaagaataattgacatttaattattattaataagtgatgtgaacattcagaaaacta

SEQ ID NO: 225 - DNA, 6127 bp, Spodoptera frugiperda
cggatcttcctcattagattttacagatttgccataattcgtgggtagatttattattaccggcgtcgaaataattatagctagttttgttcacacagtgggaagcgagcgacacgttattatcgactcaattgaaagccggaagctaaagaatcggaaagaacgtcccacttgacgatcgtctcgaatttcggcatactcaagataaatagaatcactcgatttcgacgtcgcaccatactctaattaatttactacgcctactatgacgcaatagtcgcccgccacaccggacgccatcggatttaacggtcgaaatacagggtaaagaggcgggcatgaacgagggcgcgccaatgatgtatcatgggagcggggccttcggaggcccggggcagatattcatgatgggtggacaggagcggtcggctcgccactacccgctggacgcgctgcagagcttgggcgggggctcgcccgccggacatgccactccgcgccgctggcagccccgccgcgaccgccaccctagcgccaagggtgcaggagacaacacagcctttggttatgactcagatgactccagcctctcaagtaatgcctctggctccaacaagtcgggagaaaaaggtgaggagtcatcccgcaacacggagcgtacgtcgggcgggcactacacgggcgggtacgggcaggtgcgcgagtggcgcggccgccgcggccgggacgtgcgcccgcagcgacgcatcgcgcccgagaggtacctcaacggctcctacccgttccaagtcaagttcacgccggacgacttgctaaatggttcaaaatgggacacactgtctcaagaaatctgggataagttcataaaatcacagcaaacagaggagacattcaggaagaagatgaacctttggagatatcttttcatcacaataaagacaatattcccgcgctacggcctgtacgtggtgggctcgacgatgtcgggcttcggcctggactcgtccgacatggacctctgcctgtacgtgcggcccgtggacgacctcgacccgcgctctcacgcactgctgcatctcaactacatactcagctacatacggagctttgatcctaatgcggagttgatccaggcgaaagtcccgatactgaagttccgagactcccgcaacggtctgcaggtagacctcaactgtaacaacgtcgtcggcatacggaacaccaacttactgcactgctattctagattggactggcgcgtgcgccccctggtggcgctgaccaagctgtgggcgcaggcgcacgacatcaacgacgccaggcatcgcacgctgtcctcctactcgctcactctcatggtcatccacttcctgcagtgcggcacggtgccggcgatcctgccgcgcgcctgcgaggcggggggcgcggccgggggcgcggggggcgcgggggcgcggcgcgcgcacaaccgcagctcgctggccgagctgttcgtgcagctgctgcagtactacgcggacttccccttcgagcgtatggccgtgtcggtgcgcgcgggggcgcgggtgccggtggcggcgtgccgggcggcgcgggcgcacaagaacgacccgcaccagtggaagctgctgtgcgtggaggagccgttcgacctgaccaacacggcgcgctcggtgtacgaccccgagtccttcgacaagatcgtgtcgacgttccgcacgtcggcggcgcgcctggcggccggcctgcgcctggcggacgcctggccgcagcgatgatggcggccgcggcgccgcgactgatcccgtgtaactatagttgagtatttatattgtactagagactacgaatgtgccactatgaaaattatatgtttacattccatagtgccatgtatttattagttaattttgcttcgttttgaggtgccatttttattgaagcgactgtcctattgcctcccgtcggggacggagtcgccgccccgccaggtacgagccggccgcggccgggatgtaacggtggacttgtactggcgacgtgcatgcactactttaccaaagtgagaaaacgtacaaaagccagcatgcagcttttgtcgttttcatttgcctatgtatagatctcaattacttgaatgttccattttgttgttatggtgtaaaccagtagttttaacaatcgcagtgttattatttctttagacattatttatgtaatagaacacattgtaaactcagtgctcaattcggaccaaagttaagtgaaaatattaattattattacttcacgtttcacgaatgcttcagttgttacaataaaaattatacctcaaaactttaatgtttggataaacgacacgcacccgacacactcgaccgtgcactacacccgtggggtaattggaaccgacaaacatctgcaacactagctgcgcaactatacagagtgggattacctcgtacagtctgcaactgcgagtcgctggtaccactgcgggaacatccagtgggacatgcgtggttggagactgtaccggagtgtgtgtgtatgtgtgtgtgtgtgtccgtgtgtgtcccaaatcgtcagtaccgcggtgtgggcagcgtgccgtggagtcccaagactgagacaaggctcggcgcgagtagagtcgagttcgttcactagtcgaagtagtcagtttctgtgacctgtgaccgtcgcaatacaaatagtcacgcagcctcgacgaggcgtcctattcgtttttaaaatgtttattattgtttatttgtaagttatttaatacgtgtaaatagtaagaaataaaaaaatacataaatattcattttagggtcgtgtatggtttttatgtaaatagtatttttgtgatgaggaaagggtaaatgacaaaaaaatatatattatatagaataatatattatacgatgcatgctttgcgtggagggagccaggacccgctcgcgagacgttatatatgtgggagagcgtacgatgggacacgagaaattccctgtgatactatgtgaaagaaaattatattgtgtacgtgtacagtgttcgatattgaagtaatcgtttaaaggtgctacaattagatattacgctccgaacgcaacggttgcggctcaataaccagacgttagatgcgctcgaggcgcgcccggcgccggcagtggccgaccgggccggggccgtgtctagcgtacgggagaatgcgtaaaacttaaataatggtgctaaatcattgtgttgccttatatttggcgctgagctacgcttaatgtacattgtaacgtaacagatgctagactactataagattattgaaggcttccgtacaacgacattgtacaagttttatagaaatgtatttacacaatgtttcctgtaaatgtaagcgaatggcaaactacagcatcttccgacttgaactgataaaactaacgtcccacaaatacatccaagtcttgtcaacttcaaccaatacgccttctataatctttcctcgctagatattcctattaaataatttacttgttactgacatgttaatttatctattttctcaaattgagaaaaacataaattaatgtgttatgctataaaatgtatttaaaaatattgagcatttgtatttcaacaagaccgcgtcaaaattcagtttaccgtaagctattgtcatttttagcgcgtaaaatgaatagaaatgagtaaaataatgttttgatgcgttcttgtagcactatgttctatgtgattagcagaattcctataattaatgtgaggatactaacaatgcatatctttaaagtaatacaaagagtgtataaaagaatattacttacccagattaggaattctgtaccttatgaacgtatgacgttgtaaccgctcgtcataatgaaatgacaatatgaactgttcacttttactgggccatagttttacagctttttacgcatgaactcgaatcgaaattttgttgtttattaaagttcatagttttctaaattttttggataataatttagtcttatacacgagtcgttagctgatgatatattattcaggttaggtaggcatctaccgatatgtttgcatcgatgcctcgcagttgtttcgttaagtttacaataactagccactagcgttatgtagactagaaattgttaagttttgttttgtaatgttagttatgaagttcaccatctggacgttgtccctcatagcccgaaagcactgacactacttgatgtaatacgcctggcattttatatcgcgttatctataagttttataaagattttacataagaggcacttggccgcgctgaataattaaagtacaataaataatttttaaaaacaagttatgtgtaagaaaactgattagagttataaagaaaagtgtctctcaaaacagttgattttttgaaaagatataaaaaaattcgacactcgattgaaagaacaaaaaaaaaactataaaattaaacccccaaaaaaataaaaccaaaaaataacaaaaaaataaataaaaaaactaaaaaattataaaaaaaaatatataaaaagtgtaaaattctgagaaaaattattttgacaattcaaattttatcgcatgttttgttggctttccatctgccttcttatgggctgtttttttaaacagtttgtttaaatcaatgtttatgtataataattatgtgttttattcaaatataaaaaaaatacaaaaaaaaaatcatgtctgggtttggtttgcaaagctaactgaaagcaatattttaccaacccgtgaaatataccgttattgtggacagtgggcgtggccacaacactgcgttgcatccaagctaccaatgttgtggcctcgcctgttgatctaatataaactatgtgaaacaagagctaacatcttctacgccaagtttcctttaacgccaggctactcttgtgtaaattatgtaaagaaataaaggaaatacaaatattacctgtaacttcggtcctgtgaccggagttccttcattaaagacttgaaaccaagtgacatcccaatgtcgcctatctcagtaaaactagctcctagacaatattgcaactaacatgtccaagacgcacatttatgtatttataattaaataggttgctatgtcctgctcttagagtactattaaaataaataatattaaaaatctgtaaaaaatatcctttaattggaatggagctaggtggtttacgtatcataataatatttacggtaccgcgttgggttcaataatttcgaatgatgaatagaagttgttccacgttgtgatttaaatcgtttgtgccggcgtggatactatcaggtccagacacgccattaggcaatgttatacttacgggctatatctggacttttgtaaccaacactgccatgtggacgtcctaaagtctaacagccagtctcaattacttatctgttggtatttccgactgcaagagatacaatcttaacacattttgttaggagcataagctccatataacttgtataaaccaaaaccaactgtaactactctcagagtcacagaggagttattgaggctggtcgtaagattaagtttcgtgtacgtacaaataaatcgttcagatatacctacataatattatattttgatctctccttggcagtattttttaagaccacattttcgctttgcctttcaatataaaatctgttatttagttgcgtacttaatttttttcatatggttattaataatagtggttcaaaggaataaaatgcaaattgttcgtcctgaataaacaataactttttcatatgagtctaactttattgttggtataattataaagaaataaatatgcatcgacatcgtaatgtatttattgtatactattgtaattatctgtatagtgtgaccatgtaatatatttttgcctccaaacggcctcttttttgtaaagatatatattttgtcacgtttttgacaagtttaatcttgtgttgcattttattttattgaacacaagcagatttttatctccatattgtacaaagaaattattgtaaagaaatattctgtaatagttaaatatatacaactgccaaa

SEQ ID NO: 226 - DNA, 9568 bp, Spodoptera frugiperda
tatatcaattatcttaaaaatattactttatcggcgtgagatcttaatgttgtaaaaaaagttagcaacattattcgtacttattatgttggtattacaaaattatgagctgatttcgacttgtgcttgtgcgtcgcgaagattgtgagcgagcatggagcgagcgagcgagtgccttcgtcatcgtttgctgatttttcaagttagaaattgcagtgtagggtgctaaaattatgttaacgaagtgaataataaaattggtgatgttgggcttaggcttattgttatttcgcaaacaaactgttaaagaacacaagtttaccgtagtaatccgtcgaaaatcgagaaagcttcaaacgtgtttgaagctttcgtttttgctttaatggaactatgaacctggaccctttaacgtttagcttgtcgcaaatcaattatctcgttataaatttaagtaagaagaacttcaagcagacgaatcaagagttgactcagctggttagcatatatgggctggaagcagaaaatcaactcttgaggtgcttgctcactgaagcagccaagaattcttgggacaccgatcgtccatcgaatgctcccaacaacagcatccacgcgtctttgctcgcacagcacctcgcgtccttgctcaatcatccagccaagtcgacggtcatttgtcgggctgtagatcaacctaacaaaactctacagaagatattaaaaccaacaaatactttactcaatcgcctgtcaagattgttaaagttaaccactgccgaggatgttgccctttctctggttctgaggaggaactcgtcgaaatctgaaattgtaaacttatccaagcaacatcttaaaaagagattcttagatctcgttcagtgttacctcgacgcagagcgcggacatcaagtggagcgtgccggacttcaggaatgcagccctgaagtgttgcaaactctactcactaatctcgcgcacgaaaactttcggttagccgcagtgacaaaggacttgtttttgaaaaaattgcgagttgatttcccacgcgaagtagtgcctattgtgctcgcgccgctactttatcctgacgatacgcagactcctctcgaggaaatgactacagctgacgacatggccgcagccatgatggataactcactagctgagatcatccgagacatcggctactctttcacctcatcggtagaggaatgcaagaacaacatgctgaacttcggcgctcgggagcctacggctacagatgtcgccaagatcatatcgacgatgatcagataccacacaaccgtccaagacggaccccctctacagacaccggggaacttctgggtcggccacgacgtcaagaaagaacccctaccacaaggacatggagaatcatggaatgcagaagttttagtacaaacactaaaagatcttgcatctaatctaaactggaaagaggtcatcctacaactcgaccaccccgagttcttcgtacctgatagacaaggactcagcttgctattcacgatactacgactcggccttcaaagtgccggctatccagcgaacatattccctgttgaatacttgtgtcggcgttggacgaatttggagggacagatgagtctcattacgaatatactcaagtatcccgatatattcagtttcgctgatcatccattccacccggtttctattgatttactaaaatcacctccggaagcagacaacaaagacgtggccacatggcgctgtctctacctggttgagctattgttatatgcttcggagcgaggatattacattcaagtacaggaactgttcaagattcctctgcaatactgtcctgatgttttgatgctggcgttactacagattagcccacccgtcaatgttgtcagacaagagctgttctcaacattgataccaatctttttgggcaaccatcctaattcaggaatcatcttgcaccacgcttggcacaatcagaatcctaatattaaggctgtgataatgcattcaatggcagaatggtatattcgtggagattgtgatcaatcaaaactttcaaggatcttagatgtcgcacaagatttgaaggcactatcattattactaaatgttcaatcattcccctttgtgatcgatttggcctgtctggcatctcgacgagaatacctcaagttggataaatggttaacggataaaatcagggaccatggagaagcgtttgtgtcctcaatggtcaaattcttacaaagaagatgtccactggtacttggcaagggaccagaagaacagctaccgaaggcggctcaactgccccatgagacaattgctacgatgttggcgtgcttgcaactatgcattcctaatgtacaacaggagctacaggaggcgatctgcaatgtgattgctaactgtcagactctcatactaagtaagactcggcagaccatagccggtatcgcacggccacacaccagagtgttggagactccctttaacccggcgggattaggcggacagcttttcccgcctcatgtagattccatcactaacttgactcccaatgttgcaaacatgaccctaggggctcctgcaaatactgcgtttgccatgactggtacattgggacctttagttactacacctgggtctccgtcacgtctaatgggcgccgggccaaatagtcctttcgcaatgatgccattacaacataatgctaatgtcgccaacatgggcctggctagaatggctccagctccggcaatggataagccacgtattccagatcctattcacttccctgagatgatgcacaatgttgctaaagaaattgaggatgaagcaaacggttatttccaaaggatttacaaccaccctccgcatccaaccctctcaatagacgaagtgttggacatgctgaagaagttccaggattcgccgaacaaacgagagcgtgaagtgttctcctgtatgctacggaacctctttgaagaatacaagttcttccctcagtatccagacaaagaacttcacattactgctcagctcttcggaggcattatcgagaaaggacttgtgcctagttacgtttcgctcggtctggctttgagattcgtgctcgacgcgttgaggaaaccggagggttctaaaatgtattactttggaatagcagctttggacagatttaagtcacgtctgaaggattatcacaaatactgcgaacatgtcagggctattcctcattttagtgaattccctccgcatctaatcgaatatgtagaatacggactgcagagtcaagaaccaccttcgaagcctcagggagctgtattaccgacgagcctcgctgcgatgctgaaccaacctccagttgtgactgcgactgctccttacagagttactccagcgatttcggtgatttcgaaagtcaccaactgcacgaccggcggcatgggaagccggccctcgatcgcgaacgcaacgaacatcgacacgctgctcacggctacggacagggaggagaagataaacgcccctcctgaacccatacaagacaaaaccgcttttattttcaacaatttgagtcagcttaatttgcaaacaaaatgcgaagaactcaaggaaataatcacggatgaatattatccttggctgtctcaatatttagttatgaagagagcgtctatcgagctcaatttccatgctttatattccaatttccttgacgttcttaaaattcgagatgtcaacaagatggtcacaaaggagacttatcgtaatatcaaagtattattgcgctcagataaaggcatagcaaacttttctgatcgttcactactgaagaatctcggtcactggcttggcatgctaacattagcgcgtaaccagccaattcttcatgtggatattgacctcaaagccttagtgcttgaagcctaccataaaggtcaacaagaacttctttacgtggtaccatttgtcgccaaagttttagaatcatgcgctaagagcattgttttcaagccaccgaacccctggacgatggcattgatgaatgttcttgctgaactacatcaagaaccggatctaaaactgaatttgaagttcgaaatagaagtgctatgcaagaatctgggcttagacatagctaatctgaaaccggcaatttacttgaaagatcccgaaaaagtcagacagattgagttccaactgtctcaacctaaaccgaataaggaagcggcgacagtggtacccgtaaacccggcgctagtgcaggctccaccaatgcagatgatgcctccgcagccaccaatgataccgacagatgacatgactgtcaccgcaccgacgccgacgagcggccttatgggcgaccccaacttgatgggagtcatcggtcttcccgaacccagatttaattacttggacgtgaacgtctcctctacatctgcatttggtcaaaagatttgctttaatccgcatattctcctgttccaaaactatccacacctaaaacagtttgtcaagcccgcgatcgagaggtcgattcaggaatggatccaccctgtggtggataggtcaatcaagtatgctttgactacgtgtgagcaaataataagaaaagacttcgcattggaccccgatgaagtaagaatgcgcacctgcgcgcatcatatgatgcgtaacctgaccgctggcatggcgatgatcacgtgtcgcgagcagatcattagcaccatcagcaccaatctgaagggtgctttcgctaccgcactgatgccttccacaccccaacagtttctggtatttcagaaggaggtaatagaaagcgcagctgctgttctagctacagaaaacatggagttggcgtgcgcgttcatccagaagactgctgttgagaaggcgctgcctgagctggacaagcgcctgctcaacgactacgagatgcgtaagctggcgcggcaggaaggccgacggtacttcgatcccatggtcctctcgtaccagaccgagcgcttgcccgagcgtgtccgcctccgcgtcggagggcccacggacgtccagattactgtatatgaagagttcgcatgcaatatccctggcttcacgcccgtacgcgacgtaggcttgttcattcccaagccatccgctcaggagcaaatgtctcaactgtcgttcagccaggtcatcaacccgacccaggtgtatggcacggacgagatgggcgctttgatttccgccgccgaagtgttcctagcgaactgcatcggtgtcgcctccctcgcggtacaagccgccaatatgcattccctactcgaatgcctctgcatcgcaagaagaaaccgtgactttgtatctggatgcgctttactgcagaaggcggtggagggattgctggacggacacatcgtgcagccgggcgcgaacagcgagcacgttgagatgatggctcgctaccgggacatccacctacgcgtgctcaagcttctggaggacgcgcgagtctatggccacgtatggactaccaagcagatcacttgctgcctcactgagtgccgagaggagctacgatacaatatcgaagctgtcgactgccttgtcaggaatcatctgatcaacttgccccagtacgaccttgccctcgcgcacatgatggacagcggcaacaactacatggctgttgcctttgcaatgcagctggttcagctttacctggtcgatgataggaacaacatctacgtaaatgaatccgacctgtaccacaccacagagacactcgtcagggttatgtcccactccagacagcccccacctgaaggacttggctccttgatagaaatgctccgagtcaaccaagaccctagcgcttaccttggagagaggtcgccattgggccctactgcgcacattcactctggaatattacaagtccggtcccagaattacgatgacccacctggcctacaagagaagacggagaatcttcttcgcgaatggagaaatgtacttctaagtcctctgaccgagattgaacttgcacagaacttcaatctctatgttcatcgcatgaacatgaacggaatcctgaaatcggacgatatgattacgcgattctttagaattgcgacccaaatgtgtgtcgagaatgtttaccagcagttgaacgaagatagaatgaatacaccaccaatgcccccgaagagggacaaatactacgccatgtgtgactccttcatcaagctggtatcccttctgatcaagaacactgccgatggcggtaacccaactccgaaattgaacctgttaaacaagatcctcgggatcattgctggatgccttcttcaagaccatgaagagcacaatactaacttccaacagctaccataccaccgactgctgctcatcctgttcctcgacatgaacatggctgaacctgtccttgaatctatgaactaccaggttcttactgcattctgccatacgctacgcatcatccgcccgagcgtggcgccaggatttgcctacgcgtggctggaggtcgtcgcgcatcgtgctttcatcaaccgtgtactcgctgtaacaccacaacaaaaaggctggggaatgtactcgacgctcctgatcgacctgttcaagttcctagacccgttcctacgcaacacggagctagctactcccgtcatgatgctgtacaagggcacgctcaaagtgctgcttgtccttcttcacgacttccctgaattcctatgcgactaccactacggcttctgtgacgagatccctccaaactgcatccaaatgaggaatctcatcttgtctgctttcccccgcaatatgcggcttcctgaccccttcactcccaacctgaaggtggacttgctagcggagatcacgctgccgcctcgcgccatcatcaactacgcgaccatcatccccgcgtcgcagttcaagaaggatttggacgcgtacctgaaggcgcgcacgcccgtcaccttcttgtcagagctgcgaggcaacatgcaggtgttgaacgagcccggccgccggtataactgccagctgatgaacgccgtggtgctgtacgtgggcacgcaagccatcgcgcacatccgagccaagggccagactcccaacatgtccaccattgcacactctgcgcacatggacatcttccagaacttcaccgttgatttcgactacgaagggcggtacctgttcctgaacgcgatcgcgaaccagctccgctacccgaacagccacacgcactacttctcgtgctgcctgctgtacctgttcgcggaggccaactccgaggccgtgcaggagcagatcaccaggatgttgctcgagcgactcatcgtgaaccggccgcacccgtggggcctgctcatcaccttcattgagctcatcaaaaacccaatttacaaattttggtctcatgagtttgtgcattgcgcacccgagattgagaagctctttgcgtctgtggcgcgatcctgcattgcagacaagacgggtgcgggagggggggaaagggagatagccgagtagcgtcgcgccaattgggagtctctccggcataagcacatgtataaaagctatgccgagaaaggcttccaaggcgaggcaggacctagccagccgccgcagccacagccgtccacttctggccagccccccaaaccagcgttgcagtggaacaaactcttccaaaagaagtaaatcagtgacgaacaatttattgtacatattatatttatattgtagttgtgaactcttatacattgatgaactgatgactgtcatcattcgatcagtctggttattgtctcaaacaataacagtttttcactattgtatttagattttgcatgcctgatttaaaaatatctcgtctagtcgcagttctaaacattatataatatctataaactactttaccaagtatttattcaggtttaccaagttagtacgtatttgaaaaagactctgtgaaattgtataattcatgtacttttaagatattagatatggatcaataaattaatgtgatttcaatataatataatgtaagttcgatgtacatacgaatgaggtttaccgggacgctggcgtgtactattaaatcatgatattgactcaattactcctgaatatggactctttgcacagatctgacatcggatgcttcgataaaaacgtttcacaattttataaaattttgtaaagtttgtcattcaaacgactctacctatagcaggcaacagcctcgtgtcaaaaatacagtagtttgttattgcatggacaggatgccatggattgctgattatgccagtggtgaggaacactagttcggtggccgaattaaaatattggatttcgtgtagtgcgtggacgtaggcgcgtgcgcatgcgcgtgctcgctgggacgagcatgtaatagtgctacgagtgtgtgggttcaatacggacgatatctcttgctgttagcttgcgggtcttgctcggcgcaccaaacgattgtaacgtgtgtactggacattgtaacttttttaaatatttcttctatatagtatcagaacaataacctttttaaattgcataaatttagcaattaaaaattgtgtaaatttagcaataaaaattgaatgatttttgctataaattatataataaattagtgaaaactcgaagtaatattggtagtgatgttgttcatgtatgtttcacatagttaggcggttctaagtggatagttgatggtggacgtttcatagttgtgtatgtagtgaccactttgcatgcaatgggtggcttaggtacataggtaagatttacgcgacgatatcactcgtgtgtggtgtcccgcatggccggtctcgcgacggatgagctgcattttaattccgtctgccgatcggacgcgcagcacacccaactcacttattttaaggcaaattacactaagtgacacagagctagttcgtcgaattaagtaaatcgactgattaaaagtaaccgctaaatcgatcgttagtcttaatgaaagcatgtatttttaattcgatgtatcttgtagtataataccggcgcgccgctatgctacggttggtttaatgttaaaacattttagtggtaattttaatatttaaataagttttgatgagcgtaagttcacgttgtaaagttttctaggtgtgacttgaacgtaatatagtggtgtacagtccggcgggggaggcgcggtatgctcaccgtgatctctgcctctctgccgggctaaacatattagatttaatgctaaaaattaaatttaaatttgcataaaaataagtcatgtaatcactttttctaaagattgtgtttaacaaaagtatttttccatcaacttgtttttatttattaccccctacaaaccctgttattgtaatgaggctcatttgataactagcaaagctaggctcggttgtaaacattgcaacaaaactcagaacaaggcagcattggtaatttgagtaagtttgtgaaatatatgattatagagcatatt

SEQ ID NO: 227 - DNA, 9699 bp, Spodoptera frugiperda
ccgttccgcgatgtaggttgctggaagataatttttcaataagcacaataaatacagttcacctttaccaaacctaggccgacaatatctaaaaacagtgggtattgccactgtataatagggcacgccaccactaaagttattagttaaataggttatttcagtttgggcctagtgaacaacaaacgcttatcaagcaaaaatatcggtaaaatttgcaaaataatcaatcagaatgggtgtacctaagttcttcaggtacacgagtgagaggtacccttgcctcaatgagctggtgaagcagtatcagataccagactttgacaacatgtatttggacatgaacggaataattcacaactgttcccacccagatgactcgaacccacatttccgtataacagagaagaagatcttcgaagacattttccactacttaaccatactgtttcaaattattaagcctaagaagttgttctttatggctattgatggtgttgctcctagagctaagatgaaccaacagagaggcagaaggtttagatcagcaagagaggcagagaagttagaagaagaagctagaaacaaaggcgagacactgccaacggagaagcgcttcgacagcaactgcatcacgccgggcaccgtgttcatggcgcgcctgcacgaacagctccggtacttcgtcaagtccaagatatccaccgaccctctctgggccaaggtcaaggtcatactctctggacatgagactccgggagaaggggagcataagataatggactacatcaggtggtcgcggtcgcagccggactacgaccccaacacgagacactgcctgtacggactggacgccgatctcatcatgttggggatgtgcacgcacgaaccgcactttgcactgctcagagaagaggtgaaattcggtaaaagtacaaatcgcacgacgagccccgaagagactaatttctacctcctacatttatcgttattaagagaatatttagaacaagagtttatatctattaaggacgggctgcccttccaatacgatttggagaaaattgtcgatgactgggtgctaatgggattcctagtgggcaatgactttatacccaatttgcccaacatgcatattagtaacgacgccctgcccgtcctgtataatacttatatgaaagtgttgcctactttagatggttatataaacgaggccggagacctgaatttgaggaggtttgaggtgttcatgcaggaacttgcaaagattgacatggagaagttccaggacacttatgcagacctcaagtattttgaggccaagactggcaggaggcctaatgctaatgagaggagagattacaagccaaataatgacgagacgtttaatgtaaacgttgatgacatcaaagcgaataaacctgatgacgagcttcaagcgttgatcaacgcgacggaggatatgtttatggacgatatggaaattgaaaatgacgatgatgagtatgaagagactagtgacgaggaagcgaatatggccatggaattcatactacacaaaaaggattattatatgaataaattagactattctaaagtcactgatgaagtgttagcggaccaagcagaaggctacgtgcgagcgatccaatggaatctgtactactactacaaagggtgtccgtcttggtgttggtactacccccaccactacgcaccctatatctcagatattaaaggattcgcagatctaaagattgagttcgaattaggagaacctttcaaaccttttgagcagctcctagcagtattaccagcagcgagcaagcagttgctaccagctccgttccacgcgctgatgacggacgaggactcccccatagtccactactaccccatcaacttcgaaaccgatctcaacgggaagagaaacgactgggaagccgttgtacttatacccttcatcgatgaggtgaatcttctgtcagcgatggagccctgttatcaaagactgactgaagaagagaagagtcggaatacacatggacctatgttggtctataattggactcagcaaaacctaggtgtaatgccagcgcctcagcacttcgacccgatcgctgagtgccacgctacagagaccaaagtatggagacaagagctagaagtccctggcagtatgctgaagagaggaatgctacctaatgctatgagggacatgctcttccctgggttccctactatgaggcatctgaagtaccagacaagtatcaaaaagggtaaagtgaaagtgtttgatcagccgtctcgcaatgagaacatgatagtagagataataagggaatcggagacagaagaccccatcacggaggtggcgaagaaaatgctcggcaaggtcatatgggccggctggccgcatctcactagagctaaagtaatatcagtatcgaacgagaagctgcgactacatcacatagaccaacagaacaacaacacggacggctccccgcactactccaccgagcccaacagtgggaacctgcagcgccagtggatcagtgaacgatccactattatagagcacaatatgaatcgactcggtatcgaattgggcgaagtgactaccgtcattcatgcggtcaatttgaaaggtttcaagtacatggtccaagacaacgtgaagatggtccaagaaccggagtggtgcgcggtcccgtgtgggtacgcgctgcaggccgtggtccctgatgtctccgcgcatataatacacgaggggggacgcttcagtacgctgcaggaggcctaccccaacggggactccgtcttcctactcacgccaggaccgcattatggtgctcatgctactatagtggagtcggagagtatccgcaacggtcgcataaaggtgtcggtagtggagcgtcccgagccggtcccgcgccagcagtcgtccgccatgccctaccgcaccgccaaccacgccgccgccgcctgcggtgtatcagcacagattttatctcgtataactggcacgatactgatggtcccgggggtacgacacgacaaccccaccgaacaagccaacaaaatcaacatcggactcaatttgaagtttaataaaaagaatctcgaggtagcaggctacacgcgtcgctgtaaggtgacaaactcatggctgtactccgagcgttgcataaagctagtgcaagagtacgagacactgttccctgaggtgttcgactgcctcggctcggggaaacaaagcaaggatgtgtacttcgagagcgatatattcccgcaggatatgggtaaaaagaaagcggaagatatagcgaaatggataaaggatcagccacacgtccgggccgcgcggcgcgagtgtggctccgaggccctggagcctgaggacatgagggccctcgccgacgacctggacaggcagctcgagactctcaaggggatggagaagaaacacaccatccaggtcaagtggaacttactgtataaggcggagctgcacagcggcaacctgtgcccggaccgcgcggcggacttcaagctgtacgaccgcgtcgtctgcgtggcgccccacctcacggcgccgcccgccgccaccgggactatagtggcggtctgtcccgccgggccctgcaacaccgtgcgactctccgacaaactcaacaccgacccctcctacctcgtcatgttcgacaaacccttccccggcgccatgaccgaggacctcttcgaagaagcacggttttacagaatgacgccgaacaacatgttgaacttgtcgtacggacgcaagctccgcaacgcggcgccgcccgcggtcccggcggacagtttcatcccgccgcggccgcagaaccaacccacgcccaacgtactgcgcagggaggacggacaccattctgcttttgctaactatagtccgcctggagacaaggcagtgtcgccggacagccgcaaccacaacgcttctgttgcgagcaacggatcacccagtgggaatagcgctacagatctattgaaaagtcttctgaaaatcagcgaggatcctgaagtaaagaaaagcaaggagactccgacgcctgaacaaaatcgcaactggcgcgcgaagaacgacaatgcccaacctactgctgtctatactcaacagaggggtccgccgccgcctcagaactggcgcaaggagaacgcgtcacacggcaacaataaccgacaacaacctgtcttctccaactacaagaatcaagcgcccgccttccctccattcccgaccttcgggcaaccctacccgggtccagtgccgaaccagatcccgttcccgcaattccaaaacccacacttccaacaacgcaaccaaccgtacaacatgccaaggaaccaaggatcacacaaccgaagcttcgaaactccaccgaataggagcttcgagtctcacaacaggagtttggaaccaaccaacaacagaggttttgatccaacacaaaacttccccaaacatttgcccagcgttggcactgttggacccaatataacgttgggaccaagttggcaccaacctagtaatccagctaatgtacagaacccgaggtcgcccaatgccaacagacctcccccacaaagcaacaacgacaaagtcagcaatccattcgtaccattacaagttcaaaccaggcgtgtctcccaccccggtggctcatcaagtaagcaggacttgggtcaatcgtcgtcacaaaagtcgacattacccaagccacagcccactaccgcaccgataaaccaacagagccagggccaaactgcgaaaccatcaaagaagaagaagaagccaagaatagcagccaacctgccgttccaaatggattaaatttattttagttttagtacagattacatagggtgttgacttaccacctaccttgtagagttttccactgcacctgttaaaatatcaaattacaaaaatagaaaaaggtattgttaaaagaaacggatttaacctaaaattcagtccagccagtctgtgtttcctgaaggaaaatgacctgggattcttcaaggcctaagggaataagttgtttacgggcatggcgtgttccatcgtaagctgcattaccacatcactacgagtaaggtgaaacgcctactacatataaaaaaatggactgcaattaggtatgtgtttaaataccatttgtttagggtgttaaacagtttcaatctaaagcttattattttcgtaaatgacatcgtttatctataatataaaactaagtccggtttttcttcctgacgctataactcccgaacgcacgaaccgatttccacggttttgcattcgttggaaaggtccgtgaggtttatagcaaagtaaattctggaaaaatttaagagaaaaccaggaaaacgaaaaattggaggcgaaacggagtttgcctggtttgctagtatatataaaaatataagtaaaatgtctactttaaaggatacgagtcgctaagtcagcaccctatctacgattgtgacctctgctcatagtgtaggcagtgttcctaaatattaattcttattatttaagtttaggtaccaatgtgtacctattgacatatcaaatgggagctgaagacctccaagagagatgtgaaccttgtctatttactcctagtttctgaaaggttgattaatgagaattttaaatatattaaaatgttcatcctctaataaaatgtaaaattttagagataaaactaatttatggtaaaatctcataagttttaagtgtttgactggatttcgattgacctaaacgtgtgttgtatacgactattcccacacgaaacaaattttatggtgtttaggggatacctgtgtgtatgtaaataatgtgaaattcgtgttcattattaaaaataaggttctaatacgaacttatgcataattttagagtgacttggatccctttcaggaatatggagatttatttaataataatttagtttttatattataaattgtactttattcattgaacattgaagcctgcactaagactgggctcaatctataaataagtttgactttgaactgagcttacgattgaaaaggaaagaaaaaaaataggaaaagcaaatttccgaggtgaggaattaaagtttggtacatgcctggattatataatgaaatcttgtaaattttgtaaatataatgaagttataagaatctgtaatgaatgagtgtgatcaatttgttttaatgtaataaaatgaaagttgcgagtatacgttctggttgattatgcctaaagtattatctttacgagagttgtcattatatgtgagtgatatttttggcgcaaattgggacaaatattggaatgttaaacgtacagtcggccaggttatttagtatgcaccttagaaattaggatacagatccagtacacagcaagaccaacgaaatggttttgaaagaaagaaaaaacatttatttcacacgcaaaaaaccaaatgacaagcaggtacagtttatgcaaacatttgataacaataataatgtttaatatggattttaatcgcaatatacaagtctgcggtgaaatgggaccagttgaacatgtgcaagacaacgccttgcgctggtattctacttacgtctacttttctaaccattgcttgggtcattagccaaccaatggtctttctgtatactgaatctatctgtattttccaacctgcatacactaaataacgtggctgactaactcggcagcagttacatagttcctcaatccaccttataaagtaaggctcgccatcgtcttagacgttaacctatataattgatttatttgtctgttcactcaagtacagagagaatatttttctacactcacgtgttatcttccagagccttttatttttatggggaaggcagattttgttaattattttcatacataatctttcctaagacatatagtagaaaacgcgtcatgtctcaagtgtatttgcgttccagttaaagcgagtttcactatggtcgattaaccttttgactcgtatgagacaccgttgaaaatatattgtacctcgcttaaattgtgttaagtttttctgaaacatttgaagtacgttacataggaagtacgtcaagttaatagacagttagactatattcaattgggtagtttcctaggtcaaaaataaattattttgatatttccacataataaaatatcccaaaataatcgtattttcattcattcatttgacgatatacttatttatttaatttttcttgctattttttgcgtaataagtatgctatttgacgcaaaaaaattatgacgtcataatttgcaatgtcatacaaaacttatagaaaagtaacgtttttgacatttcgataaaagtattgaatttgactagtaggataataccctattgttgattcgaaacatttgaagtacggccgatcgcattctcgcccgttattggtagagattattcttacaaacaatgaaatggcggaccgcgatagagctcacttcaaatgtttcggattgacaattacagaataaatatctggggtggtaaaactgggataaaattataagaacctgcgcatttcgatattacttatccaattgttattagttatctaagcagaaacatgcttaaaaatcagtaacaacgtatttgtaatacgtcataatctctgtcgttctccagcgaagtaacatagtgtgaagataaatataaattatttaatgttttcacaatttaaagccattgttggtgaatgaaatgacttgacgagttaacgttgactgttattatagtaatctcgaggtgaaacaactctgtacttaattgctttctgaaaatacaatgttttttttttttattacaatttgtttttacacattttgagtcggtactgccttgtattgggtgggttattaagtcgcgtgccctttgtctatgttaggcaaacgaatagttttaatttaatcattctaatcttggtagttcgaaattcaatgatgttccgtgataaagacgttggtcttatggacttctccagtctccagtctgacatggccatcagtactcctagtacgtgtttactttatttttaaagttagcgaaaagagagcgcgttcggcgctttgattggccggttcgattaaaccaaacgcactctcaatttaaacgtaaagcaatctcatactaagagtacaggtcttgaaatgaaggtatcgagtaccttcactataataatatactctgcttcattcactattgagttcaatttccattgacaatttcttccgagaccatatctttcatattttttatgggatagggctacaaacaagcagatagatcacctgatggtaagcagtcggtgatatgaatacccgcgcgtaatcagccatcatctaggtggtgttgcgagtatcttttactacagacccgtaacaccaaaggagttacaagtgcgttgccagccctttgtgttaattatattacttgaaagaaaccaatggtgctgccacggtagttactgaagccctgccttcctcaattgaacaagatcttagttcaacttccgcgtgtacacttaaatagtacaaagtacttagagttatgaataaatctatttttctcgtgtataaaacatttccctgtgacccgtactttttaaattgtagtggcaaaataggctcataataattgttatgcataaatactccataaaagtacctagcgcataaaataaagaaatataaactatgtttccagtgtattcaaacaattttgagctctattccaacttgtattggtttcaaattctcatagttgtttatgttggttagagttcagttttgtttgaatttgctatgataaaatttattgttatagtattgaatgttatttttttaatttgtctctaaataataactgattttgattgacttaagatacattttgtatgacattctatgtcgtttgtaataagttgttgtaaattttcttttagcgaatataaactctacgctagtgcaattaatgttgatttcacaataatgtcaagtttcaatgaaaattcaactatagtattacctacatcatgtttcgtcgactacactttattttggttggacaaaatcattattcgtcgtcatacaaaatgtattaaaaagaaaagctcatagaaatcttaaatttctcttctaaacaaagatttaaaagtgttctacttttaaaatgagcataataaacgtttaatttaaaatctaacgtacctcctacaacttaaggtccttttttgaaatacatggctaaaggccttatatgggagtccctatttttttgttaaatatccgttactgaatattgtgtacaaatctagacgataaagcgtataaaatggacctttactttggaatttaccactttattgccaaaaaaataagatcaaaaaacgtttggcggtatgtctgatatacgttattcagtaatggattacttggaatgacattacttactagttacttattcgaaacttctattattaattctaaaattgtgttcatttgacatacatttttattcagtttgaccttatttttatatataaaatcaatattatgacccattaaagtgaaaattgcaaatccga

SEQ ID NO: 228 - DNA, 3651 bp, Spodoptera frugiperda
atggaacttagcatcgccattttgttctataaattcattgatccatggtctaatagttggaacaatagccgtgctccaagcggtggttccaaattcagcggagaaaggaagtttggaagcagcaatggctcccgatttggaaatggcggatcgaagttcggtggtaatggcggaagtggtggtcgattcggcggatctggtggcggttttggaggcggtggcggtaaaaaagattttaccggcggtcaaaacatgcgccgtccaaattgggattcaatgtctctgcaaccattcaacaaggatttctacaacccacacccaacagttctaagccgatcaccttatgaagttgaagagtatagaagcaaacatgagatcactgttagtggagttgaagtccctaatcctattcagaactttgaagaagcaaacttccctgattatgtcaatcaaagcataagcaacatggggtacaaagatcctacccctattcaagctcaaggttggcctattgccatgtctggcaagaatttggttggtattgcacagactggatcaggcaaaactcttgcttacattctacccgctattgtgcatatcaataatcagccccctattcggcgaggagatggccctattgcattggtacttgcaccaactagggaattggcacaacagatccaacaagttgcttcagactttggtaactctgcctatgtccgtaacacttgcgtatttggtggtgcacccaagagagaacaaggccgtgacttggaacgtggagttgagatagtaattgccacacctggcagattgattgatttcttagaaaagggtaccaccaatttacaaagatgcacatatttggtcttggatgaggctgaccgaatgttagacatgggttttgaaccccaaattagaaaaatcattgagcagattcgccctgatagacaaactttgatgtggtctgccacatggcccaaagaagtaagaaaattagctgaagattacttgggagattaccttcaaattaacatcggatcccttcagttatcagccaatcacaacatcttgcagattgtagatgtctgccaagaacatgagaaggaaaataaattaaatgttttattacaagaaattggacagagccaagagcctggtgccaaaacaattatttttgtagaaactaagaggaaagtagaaaatatcactaggaatatcagacgatatggatggcctgcagtatgcatgcatggagacaagacccagcaagagagagatgaaacattatatcaatttaagcaaggccgtgccagtatacttgtagcaacagatgttgcagccagaggacttgatgttgatggaattaaatacgttattaactttgattatccaaactcatcagaggattacattcaccgaattggtagaacaggacgttcaaaatcaaaaggcacttcctatgcctttttcaccccatctaactctcgtcaagccaaagaccttgtgtctgtactacaagaagccaatcaggtggtgaatcctcaactccaaaccatggctgatcgctgcggtggaggtggaggctggaacagaaacagatatggaggcggtcgcggtggcggcggctcattcaagcgtggaagcaatttcggaaggggcaatggaggaagcaacggtggtggtggccacaagagatttaacacttcagtgaagatcgctgtgcggagatgtgtaatatttgtatgtcgcgatggaagcggagatgtgagctgtgcgcggacgacgcgcagtggagacgagagatgtgagcggcgtgcagtgagcgatgtcatacctttcgtgtcagaatgcgtactgagcactcaacgccccgcacccgagctgaaaaacatctcttctcgcacagcacacagcacaccgcacacatctccgctttggtatcggtgcccgcctcctagagacgaaggcaccacggtttccccgccagcagtaacagtgacgggcttgtttagctgctgcggttccacagaaaccgtcatcgtcccgacgcgacgcgacggatgctcgtcattatcagagggcaccaaattaactggtggtgaagttgcttcagtcaccttactgaacaatatctgtataccttattcaacagtcaaccatgagcaccttttaagacaattcagaaacaaaacacaatactctcaaaagtattattctataaaagcagcacatcaaagtgtagtagatgattatcgcaatgaacacaacattacttgcattggagaagatataccaaacccatacatagaaatagagaagagtgaattcccagaatatatcaaggcatttttaaaaaatcaaggttttgagaaaccaaccattatacaatcacaaggatggcctattgctttgagtggacagaattttgtaggaattgcacaaacagggactggcaaaacgttagcctacttgttaccagctgttgttcatattaaggagaaaaaggcgaagaaaggcctaggtcctattgtactggtccttgcacctacaagggaactagctcgacaaatagaaaatgtagcaaaaagttttgaaaagtccatgaatattagaacactctgtgtctatggtggagccagtcgtgcaattcaagctagcaagcttcaagaaggagttgatatacttattgctactcctggtagattaaatgactttattacgagcaaaactgtctcattgaatcgatcaacttatgttgtattagatgaagctgataggatgttagacatgggttttgaacctcaaatacgacaagctttagaaggagtcccgcttgaaaggcaaattttgatgttttctgccacttggcctaaggaagtgagacatcttgctaaagactatttgggagagtttgtgcaagttaatgtggggtccactgaactgtctgcaaaccacaacataaagcaacatgtacatatatgtgacacggataaaaaactgagtttacttcaatctataatgcatgagatttctggcgaaggatttggcaaattattgatttttgcgaacactaagaggtttgtggatactttaacccttgcactaagaagaaacggttggccagcggatgggattcatggtgataagactcaggcccagagagacaaaattatttataggtttaagaatggtcgtgcaaagattttagttgcaactgatgttgctgcacgaggacttgatgtggatggtgtaacacacgtgatcaactatgatttcccaaacacgtctgaagactacatccatagaataggtcgcactggccgtcatgaaaacaaaggagtgtctcacactatccttactgacgaggatgcgaggcaagccagtagtttgatagaagttctcaaagaagctaatcaggaaattccacaggatttagacgacttagctcgttcacatgatatatcgaaaatgaaagaaaaacagatgaagatgagaccaaagcaaaataactaccaatacggacaaaataaccaccaatacggacaaaataacagaagcaacttccaatacagtcaaagaaacaagtttaatagattcaacaaattcaaaagcgttaaatcaagtagatatggtgatgattacgtgtaa

SEQ ID NO: 229 - DNA, 1839 bp, Spodoptera frugiperda
taatattgaagtgttttgttttgtaatatttataattattttgtcgaatttaatacctatttaacttttctttatattcttaattttattaagcaaagatgaatgatgaatacgaacaccctgacgataagctattgtatgtaaccgaaaatattttacaattctgtgataatagtgaggagtttatgcgactgcgagatgtttacaattctctttaccaacaatgtcaatgtaaagatatttgttccccagctacatgtgaatgtattcaaagatctcgaggtgccaattatgaagcttaccagaaagatggtgaaaccaagtacaaacttgtatcgagaccagaaccagaatcatatccgattgtggagtgtaatgatagttgcgattgtgctgtgggactgtctgagtgtggaaatagaattgtacacatcggcccaattgaaggtctagatatacgaagctgtgacaaaggttacggactgtttgcaacatcccccataactgctggtacttttgtatgtgaatatgctggggaaatattaactgcaacagaagcttctaaaaggcatgatataaataagagggagggcaaacctaattacattatgtgtttaaaggaacactatggtagtaatactatggtcactattatagatccaagtacaatgggtaatattgggaggtacatcaatcatagttgtgaccctaactgtcatattgtgcctattagaagtggaagctgcataccaaagctttgtatatttgcttgtaaagatatatctcctgatgaagaaattacattccagtatgggtcagatgatgagacagagacagtgaatgaaagtgaccgagttaaatgtttgtgtggagcacaaaattgtcgtgggtttttaccttaccataattattaacattgggcattagaaatgctcattaatatgagttaactttatgttgaatgaaaatgaaatgatactgcattctatgctctgattggttgcttcattcacgccgaagtaaagcaaaatccttctaggggtactgttgtttcatcactatcgctacattgtataaaacaaagttgcttttcacagtctgtgtgtctgtatgcttattatctttaaaattacgcagcagcctgaggcagtttgttttaatagatacagtgcttaatatagtagagaatattaatattcatgcaaagcaagtgcgggtcctggagctacggaatgcctagcgggctatcagaggtttaaaaaaaggtgctggtcactagttagtatagttatttagttctttgttgttactcaaagatttgttaacttaatattaaaggcattttttttaaatgtgtaatagcataagcttaggtttctttttaatagaatcctgcataagaataattaatatgataatattgataagcagggtgtccctgaagttgacgtctaacggacaactgttggaaccttgctggtcacctagtgccacttggacgttgacttagtctagtatgtaagcctggacttttagcaatatttatcagttatttttcttttataaataaatactatacttttattaaacaagtctggaattgtgccctgtatcttgtatatggcaatatgctctctattacataggaggtgagcatattgcttgtataggacttataacacaaatggtaaaaagtaggtgtacattgtatagcggtattacctgccgtaatgtacacctctacctaacgtgcttactatagtggttttattaataaacaattaaacatgtactggtgactccaaaatgtttgttacctataaaataaaaataacaatg

SEQ ID NO: 230 - DNA, 1883 bp, Spodoptera frugiperda
tgaacgttagatgtcaaaattatttgccgcctcttttgacaacggccaacgttctaaagttgcatcatggcgtcttcagaaggtgcaggcgtgactacaggtcaaccaaatttacacaaacaagatttatctaaattggatgttaaaagattgacggctttatctccagaagttataagtagacaagctaccattaacattggtacaattggacatgtagcgcatggaaaatcgactgtggttaaggccatatctggggtacaaactgtcagatttaagaatgaactggaaaggaacattaccattaagctagatcaactccagttcgatagaaaaggtacatatatcacatggcccaaaaatctgaaaggaagaaaggtgaatctcaaacaagctatattggattgtgaaaattatgaaaaggagatgctaataccaaggggcgttaaacgaaaagcagaagtgttgcgaaaggtcaggcctaataagaataattcaacctatagcaaagagtatgaagtggagaaaatattagaccaggagtatgatgtatttaccaagactcccatgtttcatgtgaaatggaaaggttattctctagaacaaactacctgggaaccatttgaccatctcagacattgtcctctggttttgaatcaatttttggctgagaaactgggatcacaagttctcgatgcactttgtgagaaattaaacatatctggtcaactttcagatcaaaatttgcttgagcgtttaaaaatccttgatcttagtacccttcctgaaaaactagatatacaggaaaaattgttgcaactgttggcaacaccacctaaagaaagacatattcataaattagaagaaggaaagcgatctattttgttgtatcagttggttttaaagagggaagttcaaatgaaaaagatcaaagcctgggaagacagtataaatgatttggataaaggagaggcaataattactgtagaaaatacagtagatttagaagggcctccagaggactttacatatataaatgaatatgtagcaaaatgtggcatacaagtccgctcagtacctgaaaaaggctgtagctgtgttgaatgtggacctagactaaaaaattgttgtggtgtgcttgtggtgtgcagccctataatggtttcacttttaaaggtaaagataaggtaaatgtcaatccaggtacagcaatatatgaatgcaacaagaagtgtaaatgtaagaagaactgtagaaatagagtagtacaaaatggacgcaaagtgcccctgtgtattttccgtacttcaaatggttgtggatggggtgtcagagctatgagaaaaatccactgtggtgagtttgtttgtgagtacgtgggtgaacttataacattcgaagaagccgaaattaggggaaagacatacgatgaagaaggtcgaacttacttatttgatctagattatcatacgaaggataatccatatacagtagatgctgccaaaatgggtaatgtatcccatttcatcaaccactcttgtgatcccaacctgggagtgtatgcagtgtggatcaataatcctgatccaaatttgcctaggttggccctttttgctttaagagaaatcgaacgtgatgaggaaatatcttttgattatatgattaatatcgatcccttagtaccaactactccagaaaaaccaagatttttacatacacccgataaaaatcaagttattgagcaaggaaggagtatttgcaagtgcgatgcagattcatgtcgagatgcagattcatgtcgaagatatttattttgataagtattacatttttaaagtaagaatttgttagagcaattgaaatgttaagaaaacattaaattt

SEQ ID NO: 231 - DNA, 1320 bp, Spodoptera frugiperda
ccagttcactcgccgctcgcagtgtaagcgcacgcattacgtgtctaacaagtgtatcacaagtgtttcaaaatggtgaagttcgaaggagactttagtatcaattcgatacttatgaataaaccggcgcctccgccatcgccgaccacctcgtcgacgggcgcttcgccctccgaggccgacctcagcgactccgaactggatgtgacgggcacggagcccgtggattgcaccaagcctaaggacgacgacgacaagaaggacaagaagcacgagaagcccgcgtacagctacaacgcactcatcatgatggccatccgcaacagtcccgagaagcgactcacgctgaacggcatctacgagtacatcatgaccaacttcccgtactacagggagaacaggcagggctggcagaactccatccgccacaacctcagtttaaataagtgctttgtgaaagtgccccgacattacgacgaccctggcaagggcaactactggatgctggacgcttccgccgaagatgtgttcatcggcggcaccacgggcaagctgcgccgccgctccgcgctcaacggccgctcccggctggcctgcttcaagcggccgctgttccccggcgcggcactgcccggcgcctaccctcccgccacgtactcccagctcgtgggcctgtactcgcagctgctgtaccagaggtacgctccgatgcaaatgaagactcctcccgtgacgccgagcgcagtgcacccagccttccgtggcgacgcgatgggctacggcagcctgccttactctcccgcactgtacgaccgcttgccgtcgggcccgttcatgggccagtcgccgctgatgcaaggctcccagctggcgctggcgcagacggccccgctgctgccgccgtcgccgccgctgctgccgtcgcccacgcactcgggcgcgtccagccccgagctgccgtcgccgtcgcaccacccgctcacgccgcacatctacaagcccgtcacggtgctcacgcggcagtgatctaccagcaatctcatagaggctctaccaaatagactgacgcaaaggtcgggagacattattatttatctgtgatttagttgttagtgtagacaaattgaatggaccagtggagttgagaggtaatctctgtagttcgcaatattagctggttgtcacctctcgtagcattcctgttgtattgtcattactgtaaatatttccaaagttgtatatttattgaatagatataggattaagatataaaagagttattataatgaaataaaactaaactattgttcacattttaaa

SEQ ID NO: 232 - DNA, 2630 bp, Spodoptera frugiperda
aaaatagtataattttattgccataaaaaatacattaatagatatttgaattgtcattcgaataaatggcaacatttttaacatggccgcatgttgaacgaaacgattttctttactgtttgccaaaataaactgaaatagtcgtaattagtgagcggatttatgtagattgcatagccgagagactgatttgttggtgacatatagtaaggtggtctgtgaagatgatgcatcacccgaacatgcatcatcagccgatctcggggcacccgccgcagcacatgggcgggcaccagggaatgcccgcgcaccatcagatggccccacatcagatgcacagagagaacaggcacgtaacactaactagggtgccgctaggtccggcgcaggcgggcggcgctatgggcgcgcacggccaggcgctgggcgggctgggcgccatgggcgtgccgccgccgcaccacacgccgcagcgaccacctcacccgatcagggctatgccacatcatccgcaagcgcagcaccactccgtaccaccggcgtcactgagctatcatcactcatcagtccattcctggccacggccgaagcaagacggacaaaacgtcggaaaaccgcaacaaatgaaggcgctccggcgtccgtacgcggtgagcggaggctacgggccgggcgcgggcgtgatgccaccgccctacgcacagccgccgcccatgcaaccaccagccgtgcctattgcacacacagtggtggcgagtgcgagtacgggcgcggcccgtgcgagtggcggcgcgggcgaggcggcggaggcggaggcggcgcccgcgcccgcgcccgaccacgacgacgcgcgcgacgccagcccgcgcgactgttcggccaacagtaaagagaagactcccatgtgcctggtcaacgagctggccaggtacaataagattaagcatcaatatcgcctcacatcagaaacaggacctgctcacaagaaagtattcacagtaacactccgactgggtgatactgaggaatatactgcagaggggtcatcaataaagcgcgcgcagcacgcggcggcgcaggccgcgctgggcggcaccagcttccccccgccgccgccgcgcgcgcccgcgccgcatgccgcgcaccatccgcatcatagacatgctggcgcggtaatgccaacagtagagctgaacgccctggcaatgaagctgtgccagccggccgtgtacacgtccatcccgccggtggcgggcccggcgcggctggtgcgggcgcgcgcgccggcctaccgcgcggccgcgctgctggcgcccgcgtacgcggcgcccgcgctgctgtaccgcgtgcgcgtgtgcgtgggcgggcgcgcgtggctgggcgagggcgccacgccgcaggccgcgcgccacgacgcggcggcgcgcgcgctgcgcgacctgcggccgccgcccgacgccgcgcgccccgcgctgcccgccgccgcgcccgacgcgccgcccgcaccgcacaaccacgccaaccacaacgatgccgacgcagggggtgacaacaacgcagacttactgaactcggaagtgaagtcccccgtctcactggtgcatgagctcgctctaaaacgcaatctctcagtacaattcactgtcaaatctgaacgaggaccaccacacatgcgggtatttgtaactgcatgtacggtgggcgacatggagacggagggtgagggcaacggcaagaaggtgtcgaagcgtcgcgcggccgagcgcatgttggaggagatgcggcgtcgctggccgcccgcgctgctccgcgcccgcccgccgcaggacaagcgacgcacgcagcccgccaagaagaaacccaggaatctcatcaaggtcagcgaggagggcgcggcgggcgcgggcggcgcggcgggcggcgcggacaacccgatctcgcggctggcggtggcgcggcacgccgtgcgcgcgcgctccccgcagtaccgcgtgctggaggagcggggcgccgcgcgccgccgcgagttcctcgtgcagtgcgacgcgccgccgcactccgccaccggactcgggcccaacaagaagaccgccaagcgacgcgccgcgcacacgatggagatgagcagtaagccgacggacgccccccagaacagcagtagcccggactcctccgccacctcgcccgatagcaagactaacgatactaagcggaaaagtaccgcgtcccaggacggcgaggctgccggggaggtgaggcagccagtgcctggagtactactcatggactaccaccagcgcactggacaaccactgcagcctaatggtgtaagtgagactagtgcgacgggcgggtccggcgggaacacgcccggcgccaaggaccagctcatgtatttatcgcagctactaggatttagcgtacagttctccgatttccctaagcgcaaccacggcgagtacctgtcgctggtgtcgctgtcgacggagccgcccgtcatgtgccacggcggcgggccctccaccgcgcactcccacgagcagtgctcccgcgccgcactgcgcgcgctcacgctcatggggctcgacgcacccacgcacccgtacgtactgcacactgtctattactag

SEQ ID NO: 233 - DNA, 4369 bp, Spodoptera frugiperda
ggccgcatgttgaacgaaacgattttctttactgtttgccaaaataaactgaaatagtcgtaattagtgagcggatttatgtagattgcatagccgagagactgatttgttggtgacatatagtaagggtaagaaattcagtgtgatacgttgtatttgacattagaaattggcggtgtttatttggtggtagttcgcgatatttatagtttgtttgtgtcacaacggcagtggtctgtgaagatgatgcatcacccgaacatgcatcatcagccgatctcggggcacccgccgcagcacatgggcgggcaccagggaatgcccgcgcaccatcagatggccccacatcagatgcacagagagaacaggcacgtaacactaactagggtgccgctaggtccggcgcaggcgggcggcgctatgggcgcgcacggccaggcgctgggcgggctgggcgccatgggcgtgccgccgccgcaccacacgccgcagcgaccacctcacccgatcagggctatgccacatcatccgcaagcgcagcaccactccgtaccaccggcgtcactgagctatcatcactcatcagtccattcctggccacggccgaagcaagacggacaaaacgtcggaaaaccgcaacaaatgaaggcgctccggcgtccgtacgcggtgagcggaggctacgggccgggcgcgggcgtgatgccaccgccctacgcacagccgccgcccatgcaaccaccagccgtgcctattgcacacacagtggtggcgagtgcgagtacgggcgcggcccgtgcgagcggcggcgcgggcgaggcggcggaggcggaggcggcgcccgcgcccgcgcccgaccacgacgacgcgcgcgacgccagcccgcgcgactgttcggccaacagtaaagagaagactcccatgtgcctggtcaacgagctggccaggtacaataagattaagcatcaatatcgcctcacatcagaaacaggacctgctcacaagaaagtattcacagtaacactccgactgggtgatactgaggaatatactgcagaggggtcatcaataaagcgcgcgcagcacgcggcggcgcaggccgcgctgggcggcaccagcttccccccgccgccgccgcgcgcgcccgcgccgcatgccgcgcaccatccgcatcatagacatgctggcgcggtaatgccaacagtagagctgaacgccctggcaatgaagctgtgccagccggcagtgtacacgtccatcccgccggtggcgggcccggcgcggctggtgcgggcgcgcgcgccagcctaccgcgcggccgcgctgctggcgcccgcgtacgccgcgcccgcgctgctgtaccgcgtgcgcgtgtgcgtgggcgggcgcgcgtggctgggcgagggcgccacgccgcaggcggcgcggcacgacgcggcggcgcgcgcgctgcgcgacctgcggccgccgcccgacgccgcgcgccccgcgctgcccgccgccgcgcccgacgcgccgcccgcaccgcacaaccacgccaaccacaacgatgccgacgctgggggtgacaacaacgcagacttattgaactcggaagtaaagtcccccgtctcactggtgcatgagctcgctctaaaacgcaatctctcagtacaatttactgtcaaatctgaacgaggaccaccacacatgcgggtatttgtaactgcatgtacggtgggtgacatggagacggagggtgagggcaacggtaagaaggtatcgaagcgtcgcgcggccgagcgcatgttggaggagatgcggcgtcgctggccgcccgcgctgctccgcgcccgcccgccgcaggacaagcgacgcacgcagcccgccaagaagaaacccaggaatctcatcaaggagggcgcggcgggcgcgggcggcgcggcgggcggcgcggacaacccgatctcccgtctggcggtggcgcggcacgcggtccgcgcgcgctccccgcagtaccgcgtgctggaggagcggggcgccgcgcgccgccgcgagttcctcgtgcagtgcgacgcgccgccgcactccgccaccggactcgggcccaacaagaagaccgccaagcgacgcgccgcgcacaacgtgttactagcgatggagatgagcagtaagccgaccgacgccccccagaacagcagtagcccggactcctccgccacctcgcccgatagcaagactaacgatactaagcggaaaagtaccgcgtcccaggacggcgaggctgccggggaggtgaggcagccagtgcctggagtactactcatggactaccaccagcgcactggacaaccactgcagcctaatggtgtaagtgagactagtgcgacgggcgggtcgggcgggaacacgcccggcgccaaggaccagctcatgtatttatcgcagctactaggatttagcgtacagttctccgatttccctaagcgcaaccacggcgagtacctgtcgctggtgtccctgtcgacggagccgcccgtcatgtgccacggcggcggaccgtccaccgcgcactcccacgagcagtgctcccgcgccgcactgcgcgcgctcacactcatggggctcgacgcacccacgcacccaatacaaagcgtaagcagtactcccgccaagacgagcgtagtaagtaacggcatcgccgagtagagcacgcggcgagtcccggcctgcagctaacttcaccgccatctcgctaactggtcgactataatattgcaatatgtacccatgtgaatatctcacagcacgaaatgttcgggacgatctcgcaaaattcaactattgactattttgtgccgtttccggctatgatatattcacgacgttttgtttgatctcgagtcttgcaacaactattaattttcatcgatgaactttcatatttttttgaattttaaatgtatattttttgttatacattgcgttatacgatctgtaagaaactacttagttaatttaatgtttacgtttactggaattatgtactgaagctcacaaattaggtttaaaacttttatatttattacaaaaaatgtttggttgtcttgtttttattaggagcaacgctcatctatcgtattttttaaaataactttatattgcgacgtaagccagatatgatctaaactagttgctatgtgtattggctataatatatactgaaactgtcttattgtataagaatcgtagaatataaaaataaaatatcattaaattatgtaggaacgaatattgtaacgaaactggggctgtgaagccaaaccaaatgggtttccttgggacgagcggcgggctcggtccgtcccgtcccgacgaactgacgttacatcatgcggccatggtgtactaggttagctccgcagtagtaatcgccgtgtccctcgtccgcctgtagctgcacgttgtacgtgcgcctccacttcagtattttctaccgttgttcattgctattcctgtatagttaggatactcgcgggggctacggcgattaggacgatgtttggcctcgatttttaactgacttattagtggatgagcgttaagaatagttcccctgaccctaagctatgaaatgtgtaattttagactaacgatagatttcacacgctgacacgagacgagttggatgctgcctgtcaacttggcataaggttgaaggttgcttgtatacctaggctctgtgtaacctatatttaatgcatgtaccacgtaattgtttagtatagcgttttattattattgacatttaaacaatgttctttctaggtgttaattgtaatcaatataatacaattgatcggtacaatatgtatgtatctaaaccatatgtattggattaatgtgtgtatgtttaattaagtttgtgttgtcgtgaggatgcgatccaagcgggacccaggcaccggtcaattgtatgttctgtaccgagggattgtacatttcattgtaatgggtccgcgatcatacgagcacgtacatgtcgatgtaaccgtgtcttatactttgcaactgtagtttatgtaatactacaatctaagcattatatactagcgatgtgtttacttcttcgtttgtacgttcaaacgattttaaatcgaggccatcgatcaatttcttcatgttggaagttgcacaagtaactaagcataaagaaattaaacttattattggataaagaaaaacgccaaaagggcattaagaagtttatttattttgttgtaagcaactaatattttatattattacgtaggttggagcaagtcccaattggatttcgtgcttttagcaactgtactgtaaggatataacaataaaaagttgaatatta

SEQ ID NO: 234 - DNA, 1863 bp, Spodoptera frugiperda
agaaagagcaaagagctgataacctatcgaatatgtattaacaattttcttttattattttaactagtttaagttctgttctattcacttcagtataatgaagaatcagctggtcttttttcttcacataatttttattacgacagttacctcaaagacacactctgttaaagatttaaaaaacgtatttaaagatgagctctgcatagaaggtaatattaatagtatatattccaaaaagacggacactgtggttgtgaagagtacaaaaactgaaggtcttctcaaccttacttctgtaggaacagtacaggagtctgaaaagccagtattatccagactgaatgaactagttggcttcaatcaaattgactattatttcaaacttgaaaatgaagagggtcctccacataataggttgtttacagtagaactaaccttaggcaaagaaaaatatataggaaaaggaaaaagtcttaaaaaagccaaacaagaggctgccacaaaagctttagaaaaaactgaatatgattttcccgaaataaaaaacaatagccctgaggatatagaggaactcactcccactgttcttctaaataatatagcctctaaattgggtgttggagttacatattatcttctagataaaaataaagaggaaatactccattccaacatcattatgactgacaaaaagaaatcatatttgcaaagactgaatgcgtctatttacaatgacaaaaaattaagaaaaaagaaagagatagagtcaaccaagggtccatttaggctgaaattgaaatttgctgattatacattctttacaacttcacattcaatacagggaggaagacatgaagttgctgtacaggctctggaatacttggttaaaaacaaagacagtctagatatcgcttgtttgcaggaaggatctgaagctgaatgcaagcagaataaagattacctgaagtcacctatctccaaagtgtatgaagaagccgaaaaaaggaaaatgagtatagaatgtgaagtcataaaagaatctggaatgtctcacaagaaaaaatttaagactgaatgtagattgggtgatattataacagaaggtgaaggtttttctaaaaaagaatcaaaaagagatgctgctatcaatatgttggcaaaaatagctgaattggagcctcttccaatagaggaagaagctagaaattttataaaaaatgacaagaaacaaaagaataggaagaaaaataaaaagaacaagctgatcaagactaagtttgatgagattgggatgatgcttgacaaagtgggagaatctattaaaacaatgactacaaatatttttggagaggaagatcagcctactgattcaaatgattcaagtggatatgatgcaaaacctaaggaagtaaaatcgaacaagaaaagtcataaacaacagccaagaactaaacaatcatcatttcaagatgaactgttagaattaagcaacatattaggttttggaatatcttatatagatatttctgaaaaagataaacatgcatctctactatctctttataccaatccagaatatatttgttttggtgaaggcaaaactgagtctgatgctagaaatagtgctgctgataacggcttagatttgctggagaaaattggtatttatgatttatttcaagaacagaaggaaaccaatttggagagggaaaccaaagaaggagtaagaattgccatgaagcacatagtttcagaaaagaaagaggaattgtgataaactgcccagtaattttgtttagtatgtttatctttttttgaagtttaaattatatatttgttattaataaatattttaaatta

SEQ ID NO: 235 - DNA, 2826 bp, Spodoptera frugiperda
cactatgaaaacgctggtcaacctaccgaaccagatcagcacagtactgagcatcagaactgttcaaacactaatactttgtctacgcccaacgctactttggcaaacataaaagaaaaaacacccatgtgtttggttaatgaattagcaagatacaataagatccaacaccagtatagactcactggggagcaaggaccagcccacaagaaaatattcacagttaccttgaaactcggtaatgaagaatatgaagcagaggggcccagtattaaaaaggcacagcactcggctgccgctcaagcgttggctaaaactgaattcaaacatccaccaccaaaaacgaactacgtaactcagccaggttattatccacggcataatttgtacaacgctcaaactcagccgcaaaggtacacctacgatgcccgccgtaacatcagaggtcactatccataccacgagaaccgccgtaacatcagaggtcactatccataccacgagaaccgctattacggccagtttagacctggagcgcctcataatccaggagacccatacacagtgcgtttaagagttggcgaacgggagtatccgggacaagggtacacagtacaggctgcccgacacgatgctgcgtccaaggccatcgaacatattaaacaactaggtacttcggaccaaagtgatggggatatatctcctgatgttactcagcagatatcgaatgactctgctcagtatctcctgatgttactcagcagatatcgaatgactctgctcagggaagcctatctgacattaattcagatctgaagtctcctatttcactggtatatgagattgctttgaagagaaatttgaacgttcattttgaggttctaagcgagaaggggcctccacatatgaaagtatttataacacaatgctgtgtgggctccttcatagccgagggcgaaggaaacggaaagaaaatctcaaagaaaagagctgccgagaagatgctggagcaactttcgaagcttccaccgcttccaaacgtcacgaatatagctcagctgaaaaagaaacgtgttacaaacaagaagaagacacgtaacttgatcaaagttaatacagaccgatctacggaagtggttgaagaaattaatccaatatcgagattaattcagatccaacaagccaacaaggaaagagaaccagtgtatacagttttggaagagcgtggtgcaccaagacgtcgtgaatttgtcatcgaagcttccgttgctggccattcctgcactggcgtggggcccaacaaaaaggtagctaagcgtaatgcaacaaaaaggtagctaagcgtaatgcagctgaagcattactgatcgatcttggctacagtaacactaacatcaacaatgtcaagcccatcgccaaagacaaggaagaaggcgtcgctccaaacatccatcctaacatggacaaaaatcgcaaggtaacttttgttgaagaagttcctgaggttcaacccactcaatcggttggtggcagtggtggtagacaattggtaccagggattctcttggttactgaacaatctggcttcccgaagcctaaagatactatggacaaacctgtgcaacagcctcctactcagattaaacctccatctacaatccagggcgtacgttctaaggacaaattgctatatttggcccagctgatgaatatccattggcccagctgatgaatatccaagtccagttttcggatttcccaaaagcaaaccacgaaatgtatttgacattggtgtctcttagcaccaacccacctcaagtttgtcacggtgaaggtccgacaactgaagcttcgcacgaaaaagctgcccttgaggctttgaaagctctttctgaactgggtctcgatattgcccccaaagatggttctggtggacctaatggcaatgaaaatgcttccccagtggtgtctaacaaggggccggtacaccaaaacggcgtgaagaactaaacttgaactctgcgtaggctgtaccaatggccttaattttttaggaatgcatctcccttagtgactgcttttttttagtcattggtacagaacatttatacatgagttccatgtggccatgtaaaaaatttgcataacttatattcaaataactacgaattattttttttcttatttaatgtgatttcattaacatatgttatatgaaatgatatcatatatatatatgtaattctggttattgcttgagcactgtgtatttcaagtcagtgctacccattttcgttttcgtgggcagaaaacgaatttgggagacagtagttcagaattggtttacaaaattgtaagtcgtgtataaggtatacacatttagggttcgaatatttatcatgttttcaaaatatttctaagtattttaaacacagaaccctccactatatatatagaaaaagacgtcagattctcatattatatcatggtcaaacaaagcagcagcatcaaaggtgaacatagccgtaatgatagctaaccttcttaaaggacacggcaacttaaggaagtaaaagaatgcaaacaaatccagtggatattctagctgtgccagtaaatggattgtagacgtaaagaagacgaacgttcagctaaaaataacttttaaaatgtgaaactacacccgacgtggtaccactattagcggtaccaccaggaaataggagtaaggtttgtagacgcaaagaagacgatcacctcaaagtagctttaaaacgtgaaactatacccgacgtggtaccactattagtggtaccagtaggaaat

SEQ ID NO: 236 - DNA, 1359 bp, Spodoptera frugiperda
ccgccgtaacatcagaggtcactatccataccacgagaaccgctattacggccagtttagacctggagcgcctcataatccaggagacccatacacagtgcgtttaagagttggcgaacgggagtatccgggacaagggtacacagtacaggctgcccgacacgatgctgcgtccataaacaactaggtacttcggaccaaagtgatggggatatatctcctgatgttactcagcagatatcgaatgactctgctcagggaagcctatctgacattaattcagatctgaagtctcctatttcactggtatatgagattgctttgaagagaaatttgaacgttcattttgaggttctaagcgagaaggggcctccacatatgaaagtatttataacacaatgctgtgtgggctccttcatagccgagggcgaaggaaacggaaagaaaatctcaaagaaaagagctgccgagaagatgctggagcaactttcgaagcttccaccgcttccaaacgtcacgaatatagctcagctgaaaaagaaacgtgttacaaacaagaagaagacacgtaacttgatcaaagttaatacagaccgatctacggaagtggttgaagaaattaatccaatatcgagattaattcagatccaacaagccaacaaggaaagagaaccagtgtatacagttttggaagagcgtggtgcaccaagacgtcgtgaatttgtcatcgaagcttccgttgctggccattcctgcactggcgtggggcccaacaaaaaggtagctaagcgtaatgcagctgaagcattactgatcgatcttggctacagtaacactaacatcaacaatgtcaagcccatcgccaaagacaaggaagaaggcgtcgctccaaacatccatcctaacatggacaaaaatcgcaaggtaacttttgtgtggtagacaattggtaccagggattctcttggttactgaacaatctggcttcccgaagcctaaagatactatggacaaacctgtgcaacagcctcctactcagattaaacctccatctacaatccagggcgtacgttctaaggacaaattgctatatttggcccagctgatgaatatccaagtccagttttcggatttcccaaaagcaaaccacgaaatgtatttgacattggtgtctcttagcaccaacgaaatgtatttgacattggtgtctcttagcaccaacccacctcaagtttgtcacggtgaaggtccgacaactgaagcttcgcacgaaaaagctgcccttgaggctttgaaagctctttctgaactgggtctcgatattgcccccaaagatggttctggtggacctaatggcaa

SEQ ID NO: 237 - DNA, 2552 bp, Spodoptera frugiperda
gagtagacggattaactaaagatgaataatcggccaggcccatggacattcgtaataccagagaagtaataagtgcaattctggcttttttggagttagagttctgaaaatttaaggtgacagaatgtctcgcaacaaagacaagcatgagggcgctagcgggcgcacttaccacattatgtcggaggcggagcgggcgtccggccgtcgagggggctggaccacgcttgaggtaacaggaggtgtgcgcgccctagcgcctcaactcttccaactgacgcatctgacggcgctgtatctgaacgacaactcgctgcagaggatcccgcccgacatcaaccagttggtcaaccttcataccctcgatatatcgaataacaagctaagatcgctgcccgctgaacttggcgacctcattcaactcagagaattacatctacacaacaactacctccgcgtgcttccatacgagcttgggaaactcttccatcttcagctcctaggattagggggaaacccacttagcaaggagatgctctcgatttacaacgacaacaacggaaccgccaagctgttgacgtatatgctggacaatttacaagtttctgccactctaccaccacagaggccttggataccattgacccgaccgaacagaactcgtcctacttgtatattcacagtgatgtgttacaacgtgctatgtgacaagtacgcgacgcgacagatgtacggctactgccctagctgggcgctcgagtgggactacaggaagaagggcatccttgacgagatcagacattactcagccgacattatcagcttacaggaagtggaaacagaccaattctacaacttcttcctgcccgagctgaagcaggatggctacgatggtatcttctcccccaagtcccgcgccaagaccatgggcgaatcagaaagaaagtatgtcgacgggtgcgctattttcttcagatctgcaaagttcgctttagttaaggagcaccttatagagttcaaccaactggcaatggctaacagtgagggatcagataatatgttaaaccgtgtcatgccaaaggacaatatagggttggcagcacttatcaaaacgaaagaggcagcatgggaaaatggattaccaacagattcttcgatgctcggtcaaccgatcctggtgtgcaccgcgcatatacactgggacccggagttttgtgacgtgaagttaatccaaacgatgatgttgagcaacgagctgcggacgatactcgacgagtcggcgcggtcgttgcgtctggcgggccagagagacaacgtgcagctactgctgtgtggcgactttaattcgctgccagatagtggtgtggtagagttcctatcatcaggtcgtgtgtcatccgaacatcgcgacttcaaagagctgggttacgccggctcgctgcgtcgcatgcccggctctgaacacgagttcacgcacaacttcaaactcgcgtcagcatacagcgaagatataatgccctatacgaactatacgtttgacttcaagggtattatcgactacatattctatagcaagcaatcaatgacaccgctgggtctcctggggccgttgtcgcaggattggttccgggagcacaaggtagtcgggtgtccgcatccccacataccttcagaccacttcccgttgctggtggagctggagatgtccccgacggcgggcgccaactccaacgggctgatcgggcgcaggtagcacgcgtccccgcgcgcgcgcaagcacaagcgccacagcgccctctagcgacgccgcgccaccccccgcactccgcgccaccggactgttgccaaccacagacgtttatgcttccattatactaaacttgtcactctctcacacccgactcgttcgtgcgattggaagaagtagacgcaaattacgaattctatatttaccctcattgactactttcataagagattataaaaacttctacttttcccaactcgctctatgtctattatctatttttaaataaactgaccaagagcttgcctagatcgcaggcggcgttgcagtgctacgtgtcgcctctctgtctgttgtacttcctctctcgctcacatttcctgaacaaatgtttcatgcacagctttggatacgctctccgagatctaggcaatgctcaaattaatgcaacttgttaactgtgctgattaaagtcaaattaaatattgattcgttgttgaaaaatatatagtaggtcgaatatttcaaactacaacaactaatatcaaagttcactctaaaatatactttacaaatatcagtaactagcttatgaatcgtttatgtacaaataacttagtcttaagtacttacttaaatcatctcatagtatactctgcgttgtttttgttatcgcatggtttggacgcgtctccgacctggacgttactttagttgatagttacaaatgtattttgtataccgttacacttgataccgaacgtcgttctcttttcactggacattagttctgaattagtgccct

SEQ ID NO: 238 - DNA, 4954 bp, Spodoptera frugiperda
acgatttctacattgtaataatgcgagcagctgattggtgttatctttccacatacacttttgcaccaattatcaatcagtttgtaaacggaaacaaaccatgtgctaacatggcgatttttcatcgttcttcgcatgtcgtttgataattattgcgtggctgttatgggaatttggtttaatcgtgcaatattttatctttttgacacattttctttgttttgttcaatataattatatcggggaaaaatgagtgtcgacgcttatggaccgagctcacaaacactcacgtttttggatactgaggaagcggatcttattggggctgatactcagggctcggaattcgaattcaccgacttcacccttccatctcagagccaaacacaggcctcccaacatgatcatggcttgtcatcttcaaatcaggtgaacggtttaggtcgttctgatttgtcatcgaaagtgtccaatgtgactaatgctatagcagagttgcaatttgaagaagaagatgaggccttgtacagcaaggagttgcctgaccacgcgtgcaagtactgtggcatacatgatccggccactgttgtcatgtgtaacatttgcaacaagtggttctgcaatggtcgtggtaacacctcgggatcacacatcatcaaccacctggtccgtgccaagcacaaggaagcagccttgcatagagacggcccactcggggagactctgctggaatgctactcatgtggtgccaggaatgtatttgttcttggctttataccagctaaggcggattccgttgttgtattgctgtgccgacaaccatgtgcagctcaaagctccttgaaggacatgaactgggaccaagagcaatggaaaccattgatttctgaccgagcctttctatcttggctggtgaaagtcccttctgaggcggagcagatgagagctcgtcaggtgactccgcagcaaataggacgcctcgaagagctgtggcgtgacaacgtggatgctaccttccaagatttggagaagcctggagtcgatgaggagcctcatcaagtacttttgaggtacgaagatggttatcaataccagaacatctttggtcctctggtgaagctagaagctgattatgataagagactgaaggagtctcagactcaggaaggcattgaagtccgttgggatgtcgggcttaataagaaaaccattgcatacttcaccctggccaagacagatagtgatatgaagttgatgcatggagatgaacttagattgagatatgtaggtgagctgcataaagcgtggtcgggtgtcggacacgtgatcaaggtgccggacaactatggcgatgacgtcggccttgaactgaagagcggcgcaggcgcaccactagactgcacctccaactttgttgttgacttcatttggaagagtacttcttttgacaggatgcaactcgctttgcgcaagttcgctgtggacgactcctctgtgtctggctacatctaccgtcgcctgctgggacacgaagtggaggaagttctgttccgcgttcatttgccgaagcacttcagtgctcccaacttgcctgacctcaatcgttctcaggtctatgcagtaaagcatgcgctacagcgtccactgtctctaattcaaggcccgcccggtacgggaaaaaccgtgacgtctgccacaatcgtataccaactggtgagacagaacagtggcccggtactagtctgtgctccgtccaacaccgccgtcgaccagctcactgaaaagattcacagaactggcctcaaggtcgtcaggctttgcgccaagtctcgtgaagctatggagtcgtcggtgtcatttttggcactccacgagcaagctagggccctaggctccgctgacagcgagctcaggaagctgactagattgaaggaagaagctggagagctgtctgcggctgacgagaggagataccgcgcactccgccgcgctgctgagcgacgtctgctggacgccgccgacgtcgtctgcaccacctgcgtcggtgcaggggaccccagggtcgcacgcatgcgcttccagtccatactcatagacgagggcatgcagtccaccgagcccgagtgcatggtgcccgtcgtactgggcgcgcgacaactgatcctcgtgggtgaccactgccagctgggccccgtagtcatgtgcaagaaggcagccaaagctggcctcagccaaagtcttttcgaacgtttagtcgtcctcggtatccgtccattccgtcttgaagtccaatatcggatgcatcctgaactgtctcgtttcccttctgatttcttctatgaaggttctcttcagaatggtgttagtgctgaagaacgtcgtttgcataaaattgacttcccatggccgagacccgatcgcccaatgttcttctacgtaactcaagggcaagaagaaattgctggttctggtacatcctacttgaatagaactgaagctgctaatgtggaaaaactcactacacgatttttgaaagctggagtacgtccagaacagattggtatcattactccttacgagggtcagcgatcatacctcgttcaacatatgcagtatcaaggaagtttgcatgccaaactttaccaggagatagaagtagctagtgtagatgctttccaaggtcgagaaaaagatataattatcatgtcttgcgtccgttccaacgagcaccaagggatcggtttcctgagcgacccacgtcgtttgaacgtagctctgacacgagctaagtacgggctcatagtagtcggcaacccgaaagtgttgagtaaacagccactgtggaatcatctgctagccttctacaaggaacgtcgagtcctcaccgagggcccactttcaaacctgaaagagtctgccatccagtttgcgaagccaaagaaattggtgaacgcgcagaatccgggctcgcacttcatgtcgacgtcgatgttcgacgcgcgcgaggcgctggtgccgggctccgtgtacgaccgcgcgcgcgcgctgcgtgacccactggcctacgtgggccccgagcgcgccgcgctgctacacgcgcccgtgccggccgccgccttctccgcgcaccgcgggccgcgcgcaccgaccgcgccagcgccgcgtcccgcgcgccgccgcccgcctcgcctaagccaggaaccactgtcgcagcaaccgccgctgtcgctgtcgcagggcgcctcgcagccggacttcagccaagagtcggcggcgcccgactgtccgtcgcagcccgacgggctgttgtcgcaggactccacgtaccagggcgggttccgagcgcgctgcagccagtactgagagcgccgggcggaccgccgcgggccgcgccgcaacagccgacctcactcctccggggtggagatccacggtactgacgacagacgccgatgcgcaccgacacctgaccgacgacaatctcaactcgggtgtagagacagacagaggcttccccgtagtgcgttgcgaccgcggggttgaatcggttgcgccggcggcggaatccgaccgcgactttgttagtcttcgcccatcgaccgtattgaagagtgaaaactcaaacttagaaattgtgtcacgcgcggagcatacttgggcaacaagtatcgttgtcaaaagtaaaatgtaaccgttccattacagggatacaaattttataggatgttgaaactaataacaccgatattacggcaagggtttaatcaaaataaaaccggttctttgaccgaattggtagtaacgtaaaatatattacctactttcattagacacgtatgcaccaaaaaatcgacattactgtaaacttgttgctatcctataatattattacacgcgttaccacggaacaaatagaaacgagtagacaatgacgtctcgaggataaatcgcagtggctagaatataattctgatagctttaacaatgtaactttacactaaagtaaatgggatagctaattatgtcaaacatatgtaaaagcaatgtcctatcaacatattagaattctacgttggaaaaaaatacgctactctttggtgttaaaatcgaatagtcacattcattaattagtactaattctttaaagaatttatttttatttgagtatttaaaggcttgttttctcgtttctaggtgtattagcgagtcgcgacgtacaaaaatttctgtacacgaagatattaccatctcagttcgtatggtagaattttaaattcattttttattttacattataaaactttggaaaagttaagccagttagtcaagatttataatttattaggcgacacacagttatttctagtaatggtttgttttcgtcatagggaaattcacattttcatatatataacttcattatcattgacgatatcaaacagtgtcagatctacatgttagacaaacaatatcaatgttaaacggggctatattgtttttccttcccattcaatctgctgtcattttttacttatttttgactgaactacttgacaaaaaacctggagtgaactcctaaaacataattatggctgttatatgtacaaattgtaaaattagctgtaaattattatgctttccattgtccaggaatttctttgatatttgtgaatacgaagctctcaaccaaacattcctcaaaattcttttgtatgtttattaatattatatctattgtctaaacactgttatagattttctaatcaaatgtcttcaatatgagtttatagtattggaaacaagtactgtggaataagattctttgtctatttctgttgtatgatatattattgttattatgttaataatgaactgtcttagatagttacgtacctacatttttgtttgtgaaggaaaatcaataaagaatgtcataaatataatttcttttatt

SEQ ID NO: 239 - DNA, 4214 bp, Spodoptera frugiperda
gaaatggtgcttgctgtcgacaaggcaagtaatttgataaaacactttatcgatactggaacgaatcgctagcacattaatgataaaatgagtgtggatgcatacggaccgagttcccaaacactcacgtttttggacaccgaagatgcagatttaataggagcggatactcagggctccgaatgtgactttaccgattttacaattccctcgcagacacaggcctcccaacatgaccatgctggccccaaagtgtctggagtacaggtaaataacaacattgtcaacaaaatcacagctgccactaacgctctgggagaattacaattcgaggaagatgatgaagagggatatttcaatactaaagaactgcctgattatgcctgcaagtactgtggcatccatgaaccaaactgtgtcgtcatgtgcaacctctgcaagaagtggttctgcaatggaagaggaaacacttccggaagtcatatcatcaatcatttggtcagagccaaacataaggaagttaccctccacaaagatggaccattaggagaaacaattttggagtgttacagttgtggagttccagctaaggcagattctgtagttgttctactgtgcaggcaaccttgtgctgcgcaaaactcgcttaaggatatgaattgggatcaagaacaatggaaacctttgattgctgaccgttgctttttgacttggctagtcaagataccttcggaacaagaacaattgcgtgctagacaaatttccgcacaacagatcaataaattagaagaattatggaaggaaaatgtcgatgccactttccaagatctagaaaaacccggtgtagatgaggagccacaacaggtacttctccgttatgaagacggttaccaataccaaaacatctttggtccattagtaaagctagaagccgactacgataagcgcctcaaggaatcccaaactcaagaaaacatcgaagttcgttgggacgtaggcttgaataagaaaactatcgcctatttcaccctcgccaaaaccgatggagatatgaagttgatgcacggagatgaattgagattgagatacgttggagaaatgcacaagacatgggcgggagtcggacatgtcattaaagtacccgataattacggcgaagatataggaattgagttgaaaaacggttctggggctcctgtggattgcggaagtaactttgtagttgatttcatttggaagagtaccagttttgatagaatgcagttggcccttcgtaagttcgccgtcgatgatgcttcagtttccgcttacatataccaccgactgttaggccacgaagtggaagaagttttatttagatgtcatctccctaaacacttttcggcccccaacttacccgatttgaaccgatctcaagtttatgccgtaaaacacgcactacaacgccctctatcgttgatccaaggtccacctggtactggaaagactgtaacatccgccactatcgtttaccaacttgttaagcaaaatggtgttaagcaaaatggaggaccggttctagtatgtgctcctagcaacaccgctgtcgaccaactcacggaaaaaatccacaaaactaaccttaaagttgtcagattgtgcgcaaagtcgagggaagcaatcgactcgcctgttagctttttagctttacataatcaaattaggaaaatggaaggcaataccgaattaccagaagttgcaacaactgaaagacgagacgggtgaattgagttctgtagatgaaaaacggtaccgaatgttgaagaaaatggctgagaaggaactgttagaagctgcagatgttatctgttgcacttgtgtaggtgctggcgatcctagactggtcaggctcaaatttcattctatattgatagatgaaagcatgcagcaggctaccgaacctgaatgtatggtacccgttgtcctcggtgtcaagcagcttattctcgtaggtgatcactgccaattaggacccgtagtaatgtgcaagaaagctgcgagagctggtctgtcgcagagtttattcgaacgattagtagtactaggtatcagaccgttccgtctagaagtccaatacagaatgcatccagaactgtccagatttccctccaacttcttctacgaaggtagtttacagaatggagttagcgcggaggagaggaaactagcgaaaattgattttccgtggcctattcaagacaggcctatgtttttcttagttacgcaaggtcaggaggaaatcgctgggtctggaacgagttatctgaatagaactgaagcttcgaacgttgagaaaattgcgactagatttttaagatcgggtgtaaaacccgaacaaataggtgtcattaccccgtacgaaggtcaaagggcgtatttagtgcaatacatgcaataccaaggatctcttcatagcaaactttaccaagaaatcgaaattgccagtgtagacgcttttcaaggtcgagagaaggacataattattatgtcctgtgtacgttccaacgaacatcaaggaataggcttcttgaacgatcctcgaaggttaaatgttgctttaactagggctaaatacggaataatcattgtaggaaatcctaaagttttgtccaaacaaccgctatggaatcatatctattatccttctacaaggaacagaaagtcttagtcgaaggtccactgaccaatttgaaggaatcgctcattcaatttgccaaacctaagaaattaataaattctgaaaatcctgggtcgcactttctgaaaatcctgggtcgcactttatgaccacttctacgtttgatgccagagaagccatggtacccggaagtgtatatgatcgcagtgctaaccaggcaatgaacgggcagttcaattatccaagccacaggggcgtgccgttggacgtttttggtagaactcacgatccaatcagctacatatcacctgaacgtgctcaagccagtatgaacctaccagtaccagttggaatgttcatgaatatggcccatattcctcccagattctacaatcaacaccacaacaagcgttacaggctcgacagcagcaaaaccaccgcaacagaaaaccgcctcagagacagaaaggcaaaggcggtaatcttagtcaagatcatacccaacctttcagccaaagtctgcaactgacacaaggcatgtcgcaacctggtttgtctcaacctggcttcagtttgagtcaacctggattatcacaagctgaactcagccaagatccatacatggcagaataccaatcgcaaatggacggattattgtcacaagattctacataccagggagataggtcagccttctaccagccaagtgcccagttctcccagccctattgatcgagttcggcgagatctgatcgtcaaattgtcagtaacgcagcaaaacaaggtcacaagatgtcgacaacggataacataaaacaaacaaattcgacaagaagagagatattacacacacaacaaaaaaaacgtaaaaaaaatactagagaagcgaacaccggaagtgagacgcgtgttgcgcatttctccatattttgtatatcctccaaatcgaaagggggaacgaggctcttccctgtaggtgacgttttcacaccgctgtgactaagatacatttatttacatcaactgtaacttattttaagcttttattttaaatttaatgttttttattaagtttattttctgttgggcgtttgtacatgggggtttaactgtattatttgggaagagtttggtaacgaaataagtagaaagaagaaaacggttcaatgttttcctaaattggtttagtcctttaacgtttttaagtttttgcctcgagtggttgcaacgtggatcagaatatgaattatcttcattcgagtactacgtattatctgttgttcgagtactacaatatgagaccttactttaaaaacttcaatttaatgaaggaatttaatgaaggcgttgggttgttttggagaagcttttacagcgcaaggggtctcacataccacttttccttcatggaacggttagagaacagttctacaagcgttctaataaaatcttgaacattcaaatattttattgaacatagtcagcgaaataacttttgtatacttcgttttattctaaacaatcgaaatcctttaat

SEQ ID NO: 240 - DNA, 5365 bp, Spodoptera frugiperda
acgtatatgaaaataatcttatgagagcaatgcagcttttttaatttaaacgttgaattattagtctaattatttaatcgttgtccgttattatttctgaactcaaacgattacgtcattgtcacgacaatgacattgataaaagattgaggttatcaaatcaattttcaggaaataatctacataatcttgataattaagaataaaattatgtgtaattaagtatttgcctcgtagaatattaagtgtaattttataaaaatgtggcaactgctgcaaacgagctcttgtcagcttgttagacaaagactgctaacagctaaaagcaatgtatattttacgaatcttatgaaaaatagaccgtcaaatgtcgtaaaacgatatttttcggaggtcaaaacttcgtcggagaaaaatgcgaagccagggttgttgctgctctgtagtccatggaagttgtgtactggggtcagtttagcgttgggagctcgttatttccttagcaacggtccggcttactgtaaggcccacacagttccttctagggttatacaaaggaggccgaatgttgaggaagacaatgccaagtttgactgggataaattcctctcttacttacaacctcataaatggctcttaatagctgctgtagggtcagcattagtggtggcattcttcaacgtttacataccagccgtgttaggagaagttgtgaatgtattggcaaaccaaaggtcgaatcctacggcagacttcatggacaacatcagaacgcccgcactcaaactggttgccttgtacattggacaggcaatattcacattcatgtacatccacctgctatcacaagtgggtgagagagtggctgcgcagatgaagcaggagctgtttgagtccatactgaggcaggacatcgcattctttgaccaagagaggaccggcgagcttgtcaataggttaacagtagatgtccaagattttaagagttccttcaaacaaactatttctggtggactcagagctaccactcaggtggtcggttcttcagtcagtctgttggtgatatcaccgcagctaaccggactcacactactctgcgtaccttcagtagttattggaggcacattcattgggtccttgcttaggaagctctcgagagaggcgcagacgcagatagaaaaatcgactctagtagcggaggaggcgatagcgaatatgcgcactgtacgtgcgttcgcaggcgaagagaacgaggcgcaactgtttgcgcaggagtgtaaggccgccgctgaacttagtatggagttgggattgggtatcggactgttccaagctggaactaatttgttcctcaacggcatggtcctaggtacaatgttcatgggtgggcacttgatggcgtctggccagatgtctgccggtgacgtcatggcgttcctggtcaacgcacagactgtacaacggtctgtagcgcaactgtcgttgttgttcgggtctgtcgtgaaaggactcagcgctggaggacgcgtgttcgagtacatcaacaagaagccggtgatggacagctctggttcgaaggtgatccggtaccacgagttccacggagacattgagttcaaggacgtcagcttctcataccctagcagaccagaagcgaccgtattgaagaacttcaacctgaagataccggcgggcaagaccgtggccatcgtcggtacgtctggcaacggcaagtctacgatagcttgtctgttggagaggttctacgacgtagatgcaggccaggttacaatagacggtgtagacgtgcgggagatggactgcaagtggctgaggggacgagccctgggcatcatcagccaggagcccgtactcttcgccaccaccgtcaaggagaacatccgatacggacgacctgaggccagcgatgaggatgtatacagagccgcccaaacagcgaacgctcacgacttcatagtgggcttccccaacgggtacgatacgctagtgggggagcgaggcatgtctctcagtggaggacagaaacagaggatagccatcgctagagccgtgctcaagaacccacctgtactcatattggatgaggctacaagtgccctggactcagcgagcgagaaagtagtacaaacagcgctagagacggcggctaaaggtcgcaccgtactcgtcatagcgcaccgattgtccactgtgatgaacgcagaccttattgtcgtgttgaacaagggaaatattgttgagatgggcacccacgctcaattgaagaagcaaaaaggtttctattggaacctcatcaagcagcaggatcagtcggcagaagctaacacggctggcatggctagcatggctttatgagagcatttcgaggtacaatctaacaatatataagagcaattgaatttgacacttattgaactggtattaaagtataatattattttgtagatgcttcggcatttagttcgaaaccggagcaattgaatttgacacttaaggaattgctaataaagtatattattttgtaggcagcaatcagttagaaaccgaagcaattgaatttgacacttagggaactgataataaagtatattattttatagatactcgagtgatcagttagaaaccagagcaatggaatttgacacttagggaactgataataaagtatattattttatagatactcgagtgatcagttagaaaccgaagcaattgaatttgacacttagggaactggtaataaagtatattattttgtagacactttagtaatcagttagaaaccggagcaattgaatttgacacttagggaactggtattaaagtatattattatgtaaacacttcggtattgattttgaaaacgacaatcttaaaggtgtttgttttggtgactcttgctctgttagttcatggcctgagtctgaggtgtagggtttgtaggacccacgacactggagaaaattctagcatgaagcttctagatagcagaaaaatatcaataaactagattgtgtgagaaattatgtaaaagaaaaacattgtgatgttatgagccgacacttagtgacttatgataagtaaagatatttacattacatatttattattgcacgtagttttaaaaatacactatacgcagtaatgaacgaaaatctgcttaatactatgaaatagagtactcaataaatttagtccattgttgattgaaattttaaaataaacccatatttttagacgttagatgaaactgttacagctttacaaaccttattttgtgacagatgacagctgtaaaaactgacagttgacagatgtaagtgatgtttctattcttatttatgatccgaccgtctcaattttcttatgtcttcacaataatacgaataatttaattggttatcctgtatattctgagggcttagtacgagtttgtattctgtttaatgagattgaaacgttaccacattccgtgttatgattggacaatgctacaatgaatcaacctatcagagcgctgaacgtggtagcgtttgtatactaggcacttgtgttgctaccagaaggtagagtaaaaactaatagctcaatttagctatattttttaaatattagttatttaattgaattaggtatgtttagtcctgatttttataacaaatggctacctataagtgctagtgattagttttaagggtaataatttatttacttgtttttttttatttacaaaattctcagtaacatcatagaatctaggaaagttatgattaagttcaatctaagatgttcaaaatgataaagacgaatattgatgtaattgcatctgagtgtcagtataacgatacgcttattcaagatatgaacataaggtcggttcacaattcagatcgaacaactgaccatattttagattccgtgctgttactgcgaattttcacaaagatattattttgtgaatcatagatgtaatgtatatggtgtgtattaatttttcaggttattttttagtaataatagtgaacaatttatttattaacatagcaaaatgtattaaagtgtccttacattgattgatgaattccacaataaaatgaacgaaaccgtaggttaaacatagttgttaatgagtttgtaattacagtcgactttcgatgattcaaaccttcgataattcgaacctctcggtaattcgaagttatcacgtacctagaaaaactctttataattcggaataaaagtcattgttacgtaaccaattaactcgttaattcgaacttaacggtgtcaatcgttaaataaatagttctaagttgcagagagaaaatgacagaaatatcatatctgaatctgtagaagtgatgcaagttcatatttcgaacattcagtaattcgaaatattttaaaaccccatgaatttcgaattataccttgtgcgctataacaaggtgcggctgacagatgccagtatgacgttgacgtctctctttagggatggacattagaaacatctttttttatcgctatcgatactcgcagcatacatttaattcttttgaatttttttattaaatgtgtgtgttatttagttgtgcagtctaactacgtgtatatacttgccaaaataaatattttatgaccgagccctgaggtgtttcagagttacagttttacagaaccgtgaagaaaacaaggatatattagtttgtatatgttagattaagtaccaccacgcattatcaatggcgccggaaatgtctagaaaaatgcctactacatatttctgctcagataatgtcactgtggtttgggcagagaaagccgcgtctacagtggatttacccacataattaaaggttttttaagaatgataattgaacgacgcacgattttcgtttttattctaaaaaaatatcgactacctatccatcgtagccgtacatcccatcactaaacacgactatggatttacgttatacgcataacactttactttatttttcatttcattagattttaattgaatactagaacattccggttggttttaatttaattaactacgcatccgaatgatttaacataatacgaatgtgatacagctaaaatattaaggcataatttttaaatcgcagcaactttcaagagtgatacgaaacgtttctgaatctgtcagccgcaccttgttagagcgcattaggtataacaagagtcgactgtattattattagatgtaaagttcctttttaaatgttacagtttggatttgtatcagttttcatgtatgagtttgtaatcatggtgggaagtaagtattgggagataataaataaatattgttacc

SEQ ID NO: 241 - DNA, 2264 bp, Spodoptera frugiperda
caaattttaatattcaaaaaattctaatgaaatgtaaaatacattcatagctaattattatagtttttaatttttatttaaaataaattttggttttcttctagtcaacaaattttaaaagaaatatataaacaataatgtggagattaattcaacaaaatttacataacaaattattattccacaatagtgcaatatttaagaaatatttctgccagggtcatattaaaaattatatctccagaacagtgtcccaaaaaccagttccaaaatcatttataccatcaaaagttgcaacatttggggttacacttactggtggtctaattataaaattgtacatatcacacaatggggtattatgcgaagcaaagaagactcgaatggctggttatgaaaataaatcagacaaaaatgttaaatttgattgggcaaggctatggaagtacttgaaaccacatatttggtacttcttagcagcaattgtgggggcattggctgtggctttattaaatatacaaatacctcaagttataggtggtgtggtgaatgtactagcaaaatttagtgaaagcagggatagtgaattatttcttaatgaaatgaagagacctgttataaagttaatatccatgtatcttgctcagagtgtatgtacatttttctacatctttatgctttcgaatttaggagaacgtatggcatataaaatgaggacagatttatttgaatctatattaaaacaggatatagcattttttgatcagcaaagaacaggtgaaattattaacagattaacagcagatgttcaagactttaaaagtagcttcaaacaaatcgtttctggaggtttgcgagcggccacgcagattgtcggttgttcagtatctttaattatgctatcacctcaaatgacattcatttctctactttgcataccatctgttatagccgtaggaacagttttcggctctctactaagatcagtttcaagaagagctcaagctcaggtagaaaaaacaactgccgtagcggacgaggcggtgagcaatatcagaacagttcgagcgtttgccatggaggaccaagaaaaggaattatttaacacagaagctgatagagcaatggttttaaatgaggatttgggattaggcattggtttatttcaagctggaaccaatatgtttataaatggtatggtgttatctactttgtacatgggtggttacttactatcaaccaatcagttatctgctggggaagttatggcatatttagtagcatctcaaaccatacaacgctctttggctcaaatatcattactttttggctctgtagtaaggggcgtagcagctggttcgagagttttcgaatacattaataaaactcctaaaatggcacttacaggaggaaaagtattaccatatgaatcagtgaagggggatattgaatttaagaacgtttgttttgcttatccaactagaagtcagcagataattctgcaaggttttaatcttagcgtaccatcaggaaaaacagttgctattgtaggggcgtctggtaatggaaaatcgacagtggtagcacttttagaaagattttatgatgtaaaagatggttcgataacattggatggacacgatataagatcattggatccttcgtggttaagaggtagagtactgggtttaataagccaggaaccagtattgtttggtactacaataatggaaaatattcgctacggcaaacctgatgcttcagatgatgaggtaaaagaagctgcactactggcgaatgcggatgaatttataaccagttttccgaagggctataacacacctgttggtgaaagaggagtgactttatccgggggccagaaacagagaattgccattgcccgtgctcttcttaaaaatccagttgttttacttttggatgaagctacaagtgctttggatacagaatcagaaaaaatagttcagcaagcattggaacgagcacggacaggtagaacggtgatagtgatagctcatagattgtctacaatccagaatgcagatttgattgttgtattaaataaaggaaaaattgtagagatgggtactcatgaatcgctgaagaaactgggaggctactattggtcattagcataccaacaacaaaacagtccagctggataatctatttgttaatattgtaaataagtatgtataatataaataaaactgttatgttttaaataaagagaattaagatttaaa

SEQ ID NO: 242 - DNA, 11902 bp, Spodoptera frugiperda
atgatttctggaaaatacatcatatggtgtatcatagagttgagcagatggcccccgcgcgtgctaatcatctcaaatgtaacaacactgggggcgtacaccaatacgcccccagcgttgataaacagtgtagtggcggtcgcaagccagaccccgcgcactctgggagcagtcgtccactcgatcacatggatcatgacgagcacactcggcaaatggctcttgttagctgtgctttgttttgtacccctcgacggtgaaatctaccaagacagaccaaaaatcaagacttcgggaggagacctcattttggaaccagctttagacaaaaatatatatctacgaccaaatggactgaaatcaaacatcttcatcggcgacataaatatacttaaagcgaaattgtcagatgatgggacgcagtaccaaccaaccagcaacgacatccccttcaatagtctgaacagtatcctgcaaagactagataagttggaaaacaaggacactgcgctaccaagcgacctgctcttcaacattaccttaatttggagaagagttaacaatatacacaggaaagtgctcagtctacaatcacaattggaaagtcggaacagagacgaatgtgaatctcacccgtgcgagcacggcggaacttgtctcaacttggcgaatggctaccattgcctgtgcccacccaactgggaaggcagggactgtgatgttgacgtaaacgaatgcaggaacttcgcaggaacagatctgggatgtcaaaatggagctacttgctacaacacgccagggtcttatcagtgtttctgcaaatctggctggtttggtttacattgtaccaggaaggcaaaagactgttccggcggtgattttgaaatgtgcggccatggaacctgtattccagtaactacaggagagggcgttcaatgtatttgccaccaaggatggacaacgaacagcaccggtatcgcttgcttaaccgatgttaatgaatgtgagtcttatcaaggccccaggtgttccgtgaaccctaaagttgactgtattaatctacccggctcattccgatgtgggcaatgtcctgccggctacgaaggcgacggctatagttgctacgacatcgacgaatgtacaacaataccgaatggaggctgcagtcctttggtaacatgccacaacaccattggttctcgcatatgcagcccatgtccacctggctatcaaggagacggagttacgtgttcttggagaggtacgtgcaatgtcaaccatggaggatgtcacccgtccgcgcagtgtgtggaaggcgcttcaccgactggtcagtcggcacagtgtatatgcccggacggcatggaaggcgacggtgttgggatcagcggctgctacgttgttgccggtagtaactacacggatgggtgtgcgctcaatccttgcggcgtccacggtacgtgccattctgttcgcaccggctacacttgtatttgttacaagggctacggtggcgcacattgcgagctagctactgacgcttgtagtgtcaacccttgccaaaatggaggcatctgcagatcggatgatagtgccatcggcggcttccgatgtgagtgtgcagcgcaattctctggaaccttgtgtcaggtaagagcgaagtcctgcggcggagtgctagataacgaagaaggcagcattgtttatcctttgactaacactacgtataatcataactctcaatgtgcctgggtcatacacacggcgcctgacaaagttatcaatgtaacgttcagtaaatttaatttagaagcaagtcccgaatgtgtatacgattttcttcaaattcatgatgggcgtaaatctgctagtcaactcatcggaagattttgcggaaataattaccctaatggtggaaatattgtttcaagtcataacaatttatatttctggttccactcagacaaaacagttgctaaagacggctttgcattacactggactagcataaagcccgtgtgtggaggggaggtagatgccacaacacatgggcacatcagctcgccgggctctcccgggccttaccctcccgatcgtgattgttattggcatttaacaaccaccctcggtaaaagaattagcttacatttctttgccttagatattgaatctcattcaaactgcagttttgactacttagcattatatgatggcgaacatacgagcgacccgcttattaataaatactgcaatagcacccagccagcacccgtgcaatctgcaggttccgaaatgctgatacatttccactcggacgcatacggagcgggacgtgggttccaaatagtttatgcaccagtagaaggcatccctggctgtggaggctactacacagcacccaggggggaacttgtttcgccttcttacgacggccgctatttgagtaaccttctgtgtgagttcaaaattaagactagtgaagacacaaagatcaaaatagaattcaaatctttcaaactggaacgatcttttagatgtagttacgattatttaaaaatatatgacggtccttctgctgattcgcggcttgtcggaaagttttgcggaacaacgtatccgaagtcgtatgtatcatcatccaatacgctttattttatatttaagaccgataggagtttgccgtcagacggttttcgaattacatatgaggccatttgcgagaaaactatagaaggcaacagtggcgtcataaaatctcccggttatccatttagctacccaaataacaaagtatgtgtttatattatcagaacagttccaggcaaagcaattcaattgacattccaagattttgacattgaagataacaggtataacggttgccgatacgataacgttgaggtgcgagacggtctcgatcagaatgctacgctactaggcaggtactgcggtggcgccgcgcacacgccgcctacgcaaacgtcaactttaaattacatgtacatcagattcacatcagatttaagcctttctggcacagggttttatgctaattacactaccatagatacagaatgcggaggtgtacatcgagagacaacaggattaataaatcatccctccgcggatagttccgacacagcttacaaaaattaccaaacctgtcggtggttactgttggctccagaagggatgcacataaagctatcgtggaacagatttgatttggaagatatgccgagctgcgccagcgactacctggagctattggagatagacgataataatgagagagatgtattgggcaaattctgtggctccaagtcgccacccgctttgacaacatcaactaatcgattggagttaaagttcgtatctgatggtagtatccgttatgctggattttcagtgtcttacacatttttagatgaaaagtcacactgtggcggagcttatattaaatctcacggcttcatctactctccaggttggcccaaacagtatgaacccaatcgcgattgcacatggactatcactgtgccggctggccaacaaatcgtgctcaatatttctcaattcaatctagaacgtcctataagagacaggtgtaaccttggggattacttagaaataagaaatggagctaacgaaaattcaccattaattggacaatattgtggagtattccaatcaagacgaatcgtctcattatctaacgctctacatttgcattttcattctgactattatttaaccggtagtgggttcaaaatcgagtgggacggtacggtaacaggatgcggaggaaccttaactagtccttcgggcaccgtgacgtcaccgaattatccaaacgaatacaccgaaaacgctgaatgtttttacaggatagttacaagcgaaggatcaagggtccatattgcattcagtgaactcgatctagaaagaactcctggttgtagagacgactacatcgaaatattcgacggccgtgatacgagtgccaacgtcttgggaaaatattgctacatgaccccggagctgagtaatatccaaacatcttcgaactatgcatacataaagttcagatctgatgtattccaaggcggtaaaggttttctgtttaactacaatactgtttgtaacaataacgttaccggtagatacggggttattgaaagtccaggctaccccggtaattgtccgctaaatacgaattgcttatggacaatcaacgttccaaagggcaacactattaacgttacatttacatttttcgatatcccaaggtcttatagattctatcgtccttggatgagagttcgtaatcaggaagaatgtcatatggactatttgcaaataaaagatattgctgatccaaattattcaagtaaatactgtggcaggacatctcctcctgccataagtacaaagggtaactctttgcaaataaaatttgtgactggcattaatacgatccacactgggttccgcttggaatggatcagttcaggatgtggagggcacattaaaaaggactttggcattatagaacttgataaaagtgtaactaacgacaaggaacttgagtgcgagtggcttatagaaggtcaaatgggtaagagtatcacaatcacattttctgagatttatatgagtgatactgctaactgcaccgtggattctattgaagtatataatggacaaaatacaaatactccagttctcacaaaaatctgccaccgcgacatggtctcagtaacttccgatagtaatttcatgttggttcgtctctcgaagcggtctacactcagagatgtgcatttcacttcacaatttagatctttgaattcaaaatgtggaggtattataaatgctaaatccggaaacatagtctctaaaaactatccaaagaattacgataacaatttggattgcttgtggtatatcactgttccggatggtcatagaattgaatttaacatcgtagacctcgatctttattcattaagggaattcggtaataaccaagtgctctgtggagactcgattcttatatatgattatgataattatttaccttctctaaattatacataccaaatatgtccaaaatcaaaatcaaatcaaacattaacacaaattattagtacatacagtaatctttttgttcaatttaaaaccaatggatacggaacggctaaaggatttaaagctaattttactatgacttgcggtgcgttaattaaaactaaacgtgatggaattatacaaagcgataacttcattcgtcacgcaaataaaagttgtatttggactattatggctgattcaccggaccaaaaaatatcgttgacaataacactactgtcaataccaaaagacaataatgtgataacaaatagaacatgcccttccacctacctccgtgttcttgatggtgatgacaaatatgctccgcttatcggtgaatattgtggccgcaaagtaccacctatgattgtcagtcacggtagtgccgtcacagtggaatttggaagccatactggagccattactggcatgttttcagcccactattcagctcttagtaacgcatgtggcggtacactaacatcggaagaaggtaccattgcgtctcctaactatcccggaccatatcctataaactccgattgtgaatggatactaaaagcgtctccaggcaacactgcctatgtccagtttgagcaattcgatttagaatattcggagggttgcaatgacgattacgttgaacttcgtgaaagcaatggagcaggtcgtctcctgggtgtatactgtagcagtgagacacctacgaatcatagtacggcttcacaaatatacattaaattccacagtaactcaaaaacgagtggtagaggctttgttttgcattatggttttcaacgtgaaaatgatattacaggacatcacggtgaaatagcttctccgttatatcccacttcatacttaggtacaggtgaatatacctggcgcattcttactacagattcagatacgatatcgataaccattgacgatttggaaatttatacacatacccaagtaaactacaacaaattaacaatttatgatggatacgattcaactgcgccaatattgcaagaactgaatggggtccttgctgaacgaaaagttattcaaagttcctccagtgtagtgttgattacactgaccacagatgaatcaaatgcgggttccaaatttcatttaagctggactaagactgtcgaaaactacgatgtggaaacaggaaattcaataaactgcggttccaatactactgaactagttgtacctgggcacactgcgagtttatcatcaccaaattatccatctgactattcagacaatctaaactgtgagtgggttttcaaatcagaaatgggaagacatttggctattaagtttgttgattttgatatcgaagatacccacgcttgttttgcagattcagtttctgtttattcatctgatactcctggtaattggcaggttgtcaatgataatatatgtaactcagaaatagcacgttctggatttaatacaagcatctacatgaaaattaaatttaaaactgactcgtctatcactaggaaaggattcctagctcgagtcaactctaaatgtggtggactcatgactgctttgtctggacacatcaaaccgacctggctggatgtacaacctcaatatcggtacatgattccaacacagtgtatttggaggattaaagtgcgacctggcagaactattaaattactgttcactcaatttaatattacaaataaaaatgacgattgtgatacttatgtcattttacgcaatggtgattctgcagaagcaccccttttggccagtggcaaatattgtggttatgaacacgaaaatcgaatggacatagttacttctagtaattctttatatattagttacacgaagggatcgttcacatttcaaagtttcacaatttattatgaagagcaaaactttgaatgtggctcaacaacaacattaacttctgatcacagatgggaagtaataagttcaccaaactatccagacgtgccaattccctattcggaatgtgagtgggtgtttaccgcgccaccaggagaaattcttagaatagattttattaaccggtttgacttagccgaagacgaagattgtgaaaaagaatctgtggaaatacgactgggatcttcgaaatattcaccactaaatggtaaatattgcagtgataaaccaggtacaattaaaagtactggtaacacaatatacgtaaaatacaccacctcactggctgaacctcggaatgggtttaaagccaatgtgtctatcgatatatgtggtggaactatagttagtgatgctggagagataaaatctccaggatatccacacttgcagatgttcccttatggaactgtctgcgagtggcgagttataggacgaccaaggcatgtgttccaaattaaaccagaagatgtgcagctacctgatacggaattaaactgtggaacccaaattacaattgaagaatctgtaccggccaacaatactattactgttataaaaacaatatgcaacgacgacattacgtcttatgaatcggtacaaacttcgagaaatgaattcacgattaaacttcatatagggaaaccagacacatgggaacaaacttcaaacaacagaggttttcgtattagttttaactcttccgtgccaatgtgtggcggttcgattacggcttccgaaggttacttgacatcacctagttatcctcaagaaaccacaatacgatactgtcaatggttaataaatgttcccgacaaatctaggaaaattcgtttggagttactagatatggatatggaaaaacacagaataggcattttcaatgacattgccttccatactgttatccaaactatccctaacgacgattatgttcctggaacaactgtttttgagtcatctggaaataaattggctctatatgtatggcttaatcgaactgctgtaacacaccgatttaaagccaggtttagttctgatgaaaaagcattatgtggtggagatctttctggaatgaaccaaattcttgactcaccagatctaaatcaatcttattcgtgtgagtggcattataatggccaagtaaatacaaacgatttaactacaacaaatacttcttataactcaatatttttgactgccaatctgagctcatcagtaaccagaacaggtgctcgttgtcgattctttgatcctcaaatcataatcaaaacagggaatagaaatagatttacacgatatatatgtggcaactcgcaaacctcattcattataccctcacctgtcatggatgtcactgcaatcaaaagtaaatcgagttcttttagcttccatatggaatggaaacctcaaccatgtggcggtactattacagtgggagaagaccctgttaacattttacaaattcctaattcttataatgatagcattaattgcgcttggatcattgaggggtctacgaatagagtggaaattaaaacggaagggtcttttaaattggattgcgatgatgaatctgttaaaataagaccaagcttaattcaaaacgcacctacaattggagattattgtaaatcaagacctttagatactccactaattactcattttagtaacgtatacgtacaatatcactcgaaagcaaaagacagcacaagtttaaggctcgtggttaggtctgtgaccaaccaatgtggcggatttcttagtgcttatcagaactcatttgtgtctccaaattaccctaaacattatttgcctaatcaagaatgtgcttgggaaatacaagttgatctagggtttagggtttctcttagatttattgaaagattcgtaatcgaggatcgtgttaactgcacgaaagacgctgtcataatttacgactggaaagacaacgagtaccaagagatagctcgggcgtgtggtcggcagacaccgccgccgtacaactccacgttcaaccgcatgaaagttgtcctgcacacggacgcagatatcaatctggatggattcaaagctacttggaattctatatgtggtggaaattatatagcaactaaaaaagaacaaattttgtacagtccaggttttccttacagttacaatccgagtatgagttgcaaatatgaaatatcagcaccaggtagccgaatagtaattaagttcctcgactttgaattggagggtactttccctgactgcagatctgataatctcaccgtttcgtcacaatcagattacagctatacgtacgaaatttattgcggcagcaaaataccccctgtctccatactctccgaaaaagtagcgctcgaattcaatagtgatcgctttatacaacgaaaaggatttagaatatccttctttatatttgaatgtggaggcaaagtcaatgagagtactatattgtcgtcatcgctttctgacacttacgatcaaaacatgaactgcacgtggatcattgaagcaccaccaacaaagatcgtggtattgaaattcccttacatagacctagaaagcaatacagattgctacagcgattacgtcgcggtatttgagggttcacttgttgatcctgataagcgtttagcgatgttatgtggacatgtcaacacaacaacgaccctcagaagtaggggaaacaagatggtgttgcagttcgtctcagactccagcgtgagttatagaggcttcaaagcccaagtttactttagttattctgaagcagctcaatgcggcggacatataaatttaacaaccggatcatcacacattttaagatctcctttaatgggacatcctgtttatgaaaactatttagactgtttctggactataagatcaccgcctgacacagtaatcaggattcattttacttcattccacgtgtctccttgccaaaatgtcaaccaaactgctatcggttacagtaaatgcgattgtgattttgttgaaatcaaagacggtatcaaccctaacaatttagtaataggaacttattgtgggcacaccctccctccagacctaagttcttctaaaaatatactgggcgtgacgctgtccacagacagtgtgattgggagccaaggcttcgaggccacgctgacggcacagccatcagtatgcgggacctccgtcatcacagttagtcatacgccacaacgcttcaagtccccgcgatatgatgatgcaggggctatccctcgaggtcttcactgtttctatcacttagacaacagtgaatctccgtacagtttgattgttttaactattaaagatttagacttacaacccgctgtcactgatagttcgaacgtaacgcactgcaatagagacaaactggttatctctaccactgatagtaatccaaatattacccttggaaaagattttatcgtaaactatcagggagcggatatcattaatcgtaattctttcttcgatagcacactgtacataccacaaacatacgagttttgcgggcgtaaagaaccctcagatttgtatctcaacggagctgtgacacttaatttaatcacgtcaccaataactgattccaaagttcacaaaggtgtggatatagaagtggtatttgcaggattctgtggaagaaattatacggaaccgtacggccgcatacaggctgcgtatgctggttactcagatactactctaagcgactgttacaccctgataactgctccagaaaactatacaatatcagcatatatatttaacgcctcaccagattactggaacgaaaacagctacgttgatgtatatgacggaaagaactcaaacgcgcctcgactagtaagaattgccacaagttatgagggtaataatcctatcttctcgactggaagatatctactattgcacaatcatgaaaataatggcgatcgtgttacatttgatttggtttacgttacaactaataaaggacgcggctgtggtgggaaactgcacactgtagagggaaaagttaccagtcctatgtatcccaacgtttacagacgtgtgtcgacctgcgagtgggagcttgagacgcccgtaggtactcacttattgctacgtttccctgtgttcgatttaggaatcacatgcgaccagaattacgtccagcttgtagacagcaatggagtcgtagtgcgaacattctgcgaggagatgcctgctgagttcagaagtagcgataattatgtaaagatagtatttgtcaccaccatgaacaatggcgggactggttgggttgctgaattcattggtagtttgtaatagttgttaaatacttacacattgcttttttaaaacttgatttaacttctctttgaggattaattaataggtatgagtaatacttgcataactgcttatgtagttttgaacggcatgtcgcatgccgcttacacatgttgttgtgaagatttgaagttaataaggttacatcgtacgccaaaaatgtttaacaatactaattacaaggcggaaggaaagaaaaatccgcattgcatgtctgtatagtatgtacttagttaagttataagtaaaaattatttgttttttcattgtttaactttgtacctatattgtatttaacattacctaatattgttttttttttgtttcgtaacagttgtgtttaacttttaaaattgttggcatattaaattaataatttataaatcgactttatttaattaaagaaacaaagctattcacgttgtttcattacctactttatccttaatctttgaataaaatctactaaatcgtt

SEQ ID NO: 243 - DNA, 14912 bp, Spodoptera frugiperda
tcactattatgcgcttcgtttcgttcgcgtttcagcgagtcgtataatttttctgtttttgtgttttcaatgtaattttaaatagaaaaatgattttattaccatctttaagttttctttactaaatttgacaagttttgagtccatcgcagtgtgttgcgatggacgtgcaggacgataatgttttagacgtcgatttgctagctgatgatggatctgaagaagaaggcgaagccccgccgtcgtcagggccagggtccactccaacatcatgtgcgtcatcgccgcggggtgaggaacctgcttctccccatggtggtgtgtcacagccggcgtttttccaccatcaaacctacacccggccattcttcacatctggccgtaggggaccagggcggccacggaaggagggaccaaaactggtacgagaaggaaagatagtcagaaggtatagaggaggcaatgctggttctgtcagaggagccaagagacacagagggagccgagatgattctcttgaagatatgatggatgatgatgacttctccattccacctatacctgaagaaccaccttacatgccagagaaatggccaggaaaagtatgtgcactttgcaacctgagtgagcgtagtcagctggggcagggtgagatgcggcagataatgtgtaagctaggagagggtgatggcagtaccaccccggcgatatgcaactctggtggggccactccgaccaacccacccacaccatccagtacccccagcacccccgtgacgcccggcctggtttcaccaccgccagaacttgtggaccccaatcaacacccacttgcgatgcctttgagtagacggcaaaaagcatttaacaagtgcaagactcctttgtacaacatggagcataccgatgagttatccattattggttacacagaggtcttggaattagcaggggttgtttcatccggagcgctgtatgtacaccggtgttgccttgagtttagcccaccattccaggatcatgtgtttgcagcctcgaattctgaagaggacaaagatcagttagaggaagccagggtcaaagggattgtgaccgctgccctgtcgaggaaatgtgccttttgcagcagacatggagcaagcataccttgtaaaatgagttgcagcaaatattttcatctaccatgtgtgcttgcttctgggggatttatggatttccagaccaaatcctccttttgcaaggaccatctttatcaagtgcctcttatttgtacagcagatatagactgtaggacgtgtagaactatcggcgatatcgctaacttgatgacgtgcgtcacttgcggcgcccactaccacggcacatgcgtcggcctcgcgcagttgccaggagtgcggtccggttggtcgtgtcggtcgtgtcgcgtgtgccaggtgtgtcgcggcgaggcgggggccgggctgcagcccccgggccacgaggcgcgcgccgtcacctgcgagcactgcgacaagctctaccacgccacctgtctcaggcctgtcatggctaccgtgcctaagtacggatggaaatgtaagtgctgccgcgtatgctcggactgcgggtcccggtcgccgggcgcgggcccgtcgtcccgctggcacgcgcactacacggtgtgcgactcgtgctaccagcagcgcaacaagggctcgtgctgcccgctctgtcgccgcgcataccgcgccgccgcataccgggacatgatacgctgcatactctgcaagagatacgtacacggaatgtgtgatcctgacgcggaaccgcaacaatatcgacaaaagaaagaacaaaatccatcttacgagtacagctgtcctatttgcaaagctcagatgcaattgacgggctccaaggctacaactttcgacgaagatactgttgcgtcaacatcccaagactcgtcgttcggcgatgagaactcacagactgagcaagatcctcttgctatagaagctaagcctgacgttggtcttggtaagggtaaaccattcacggtctcggcaaaagtggcaaagaagaagattggtggttacaaactgaagggtggctttcctcctgcgggcaaactaggcttccagaagcgtcaaagatctgtcctggactttggaaggaagagaggatctaaaccaaagatgagaggagtgtttggagtgccaggactggggctgcagagacctcaagcccctgataacaaggcgcctgaagatgatcctggtgtggaaaataaattagtgctatgttcaagcaaagacaagttcgtcctaactcaagatttgtgcgtaatgtgcggtgcaatcggtaccgactccgagggctgccttattgcatgcgcacagtgcggacaaacataccatccgtattgcgtcaatattaaggtgtcggcggtgatagtgacgcagggctggcgctgcctggactgcacggtgtgcgagggctgcggcgcgcgcggcgacgacccgctgctgctgctgtgcgacgactgcgacacgacgtggcacacgtactgcgcgcgcccgccgctggccgaggtcccgcgcggcccgtggcgctgcgagcgctgccgccgctgccgggtctgcggcacccgctccaccaccgcctggtgcgacaactacacagaatgtgctccatgcgcgtccctggtgatgtgtagcgtgtgctcggagccgtactcggacggggagctcatcatacagtgcgaggggtgtcggcggtggctgcatgcttcctgcgactccatacggaatgagaatgacgctgaagtctgctgtcgagccggctacaagtgcgtgggatgccgcgggcgcgaggtgccgccggcgcacgtgtcgcgcgcggtggcggcggccagtgcgagcgcgggcgcggcggcggcgcggccggcccagcggcccacgccgcagtcgctggggctggcgggcgagtactacgtggacgacgtgtgcctgtcgcagcgcggcgcgcaccacatgaagcagctcgaggccgacatgggcatcacgcacacacgacgcaagcgacgcttcaagaacgacaacaccgagaaagacgcagtggttcagaacgcagacgtcgagatgggcgacgactccaagcctgacagcacggctgaagtcaaggacgaacctggtgtacccaacacgaatttcaaagaaggcatattatggaacgttgcgaacgacggcccgcctcccgagggcttcaccatctacaccacggactctggtctcacagtactgcggaggaagagacagaggaacctgaacaagctcgggattggtgggtttgttgttagacagagacaaactactgccaaagcgcaggctgatgaggagaaggaaggagatggaacacaagcatctggagaatctcccagcaacaagcgcaaacctcgtcggaagccacgctctaagctcatggagcagttcccatcttacatgcaagaagctttcttcggcaaagatttactggagccaaccaaagcagcagtttcatctactgcagggaacccggcgtcgagcccggcggcgcggtccccggagccgagctgggcgcgctgggacggcgacaactcggacagcgacggcgaggacgtgctgcacgcgctgcacgcatactccgaccacgactgctccgtgctcatctcgctcaacacggacgaagtagaaatactgaactctttaaagccaaaagatgaaaaggatgacgctttaaacacgacgaattctgatggcacgttaaagatcaagactgagttagatgacggtcagttgaaacatactgaggactccactgcgttgaagaacgcgatactggggccgcagccggctgaggctgagcagccgcccacagtcgccactgagagcattcctactgtacacagtaccaaaactgaggctatcagtgaaacgggtggatcatctcaagcatcaacgatatctcctaaggacgacctgtctctgctcggagtgagtctggacgccatggtgagagacggtctgcctgacatggacagcaacgatgtggacgaaatattcaagggagtgctcactgacgactctcaggaatcgcaagagtcgtccgtttcgtacgtgaattctatggcaggtacgccatactcacaacaacggcaacagcttcagagccccatggagtacacctcgccttatcctgagtttggaggcagcagcagtaacagtgcgatgagcccgctgttctctgagagcggtagtggcggcgcgacttggcccgaccctgcgcaggcgccgccgccttcgtacaaccaacgcagtgctgacaagatgcgggctgacgagagtctagggtccgcagcaacgatatcggccgtactatacgccaacacgaaccatccggagtggaagacagagttccccaactgggtggaccgctgcaaacagatactgaagaagtggcgcgccctgccgtcggaccagaaggcgccgtacttgcagcgcgcccgggacaaccgcagcgctatccgcatgaagaaggctcagcaggagcaggagcgggcctgcagccagcagcgcagcgcgcgcgaggccgagcaggagcgccagtggaagcatctgcagcagcaacgccagcaacagacgcagcagcagcaacagatcatacacgaccagcggatgcaagcagccatgcagcggttacgtgcgccggatggcagctcgccgccgggcgcgggagccccggcgcctgcgccccccgcgccgccggcggaggcgccgcgcagtgtcttccctgcacagcgcttccaacactacgggaacaatgacgacatcaaccgccagctcagggacttactgcagagacatcccgagaaaatgtggcctggacaacacgagagtgcgtccccggcgccgggagtgggcgagggccagcccttccgccagcctctgcccgtcaccctgcgtgctagggcgccgctcatgcacccagcgcggcctgaccatcacttgataatgcagcaacgcttgatatctgcggacaacagccagctacagcaatctgtgcagagtcccgcgccgcaacagatggtggaacagaaacaaaatgtcgtccaaaataatgctcccagcaatgagaataagcaggagtccaatcaggagcaaggaaccgatgagatggatatgggagacatggacaaacttgaacaagatggtgctaatattggagaggtgggtgacatcctaactgggctaggcggtgaggatgacgaggaattattcgagacgctcacagctgagataggggagcagttcaacatcctggagtatgccgaccctgagctagcagcgctcaacgacgcggagcacatactggacggactcgagctcgctgacgacggcatgcctgagagacacgccaagagggagccagaagacgaacaggagcaagctcaagagaacaagaacatgtacaatgacttacaaaaggccgtgaagaatatagagtgcaagcctgaagtcaaggcggagatggaggatgtgaagcccgacgtgaagttggaagccccggccactcccgcgccgcaacagatgtacaacgaccccgtacacagagtcatacagaaccaacagatcgcattgcagaatgctatgcaggccatcaaatctgaagtgaaactagaaagtgacgacaagccgcagcggcccgtgttcacgcaaatgttcactaacgcaccgcaacggttgcagttgcaacaacatcagcagggtgcgcggggtccacaattcggtcccgggcaggtgatgggccagcaagtggtgcagcggccacaggtgcagtttactccctcgcaacacatgcactacgcacagggcggcagtgcggcgggtatcccagcgagcgcggccagcatagtgagcgccatgacggcgcaagtcaacgccgcgctggccgccggacgcagcatcgccgccgggacacgactcgtcgccgcagacggatctgtcggcgtcgtccgccccgaccggaccgtcgcactcgcacatctaccttacgccgctacagtgtcaggcggacaagtggggcaagttggccaagtggggcaggtgggtcaaccgggtcaggtggggtcggtgggccagccggccccgggcgggtcgcgccccccgccgccgcccccgtacccgggcacgctgcgccagccgcagccgccgccgccgccctacccacagaacgtaaaccaggagcaaccgttgcttctcgaggagctcctggagcaggagaagcgcgagcaggagcgcgagggcggcgagtgggcggggccgggcgccgcgccgccgcccgcgcccccgccggccgcggcgccgcccgccatcccgctgtacgcgggcgtggcgccggccgcgccgcccgcgccgcccgagcgcccggccagcgacgcggaccaccacgcgcgcctgctgtacgagcagtggctcaagcagtacaacgccttcgccgccgaccagcagcgctactacgaggtcgaggttcagaagcttcgcaagatccgcaagtcgctgaatagtaagcagaggcagttgcgtaagtcgggcaatgaactactgcctaacgacgcagccgagctgcagcgcgtgtccactgaacaacaggcgttacagaagcatctcgaagcggcgcgcaaacaagctcgtcaacatagcatgcttatacaggaatatgagacgaaacagcgacagcaaaatccccagctcgctcagcaatcggtgataaaccagcagcagatcacatcgagtcaaacggtattcgctcagaatcagaacatgaaccagcagggccagcaggtgcagcagcagaacactatcaaccgaccgatgcagctggggctgcagggcgctgccatacagcaacaacagacactcattcgcactcaacaaactgtcatcggggcggacgggcagccgatatcccagcagaggataggtctggtgacgtcaccgctgaacacgcaaggaaggctggtcacgcagggcgggcgcacgctagtcatcgagcagtccggcgggccccagccgcagctcgtgcgccagctggccgccggccaggagcgcgcgcagcccgggcccatggggcagttcgcaggtcgggctgctggaggcgcgcgccagcccggggcgcggcccgccatgtcgccgctacacgtgcagtcgccgctggcgccgcagtcgccgctgcaccagctgacgtcgcccatgcagtcgccgctgcactcgcagcagtcgccgttgcatcacacgtcgcagtccccgctgcacccgtccacgcagtccccgctacatacgcagcaatctccgctgcattcccagcagtctcccatgcacgtgcagcagcagggcatgacgcagcagtccgtgcagcagtcgccgatgcaccagtcccccatgcacccgcagcagtctcccatgcaccagcagtctccgatgcacccgcaacagtcgccgatgcaccagcagtcgccgatgcacgcgcagcagactcagatgccgcaacactccccgatgccccagcagtcgccgatgcactcgcaacaatctccgatgcatatgcagcagtcgccgatgcacacgcaacagtcccccatgcacacgtcgatgtcgccgcaacacttcttgcaacagttgcaagcacagaggaccagccctcaactaccgacgcctagtcggagccctcaaatatatcagcaatcacaaattcagagtccagtagcgtcccattcaccgcaaatgcaaaatgttgattatggaactggtcgtttctcacggccagcgcctggatgctcgcctttgccgacgagattcgctagaccaccacatcatcagcaaggtattagagtgggcggaccgtatggaggtcgccaacaaacgtcaccgctcggcagcccgcagccgcttccatctccaggaaatcctgccaatgagatggcgcggcaacagatgctgcagcggcagcagtacagtcccatggggggcgcccccgcctccccctccgtggcgcgctccccccacgtggcgcgcacgcccactccctcccccgccgcctcgcccgcgccgcactcgctcatggagcacggcggcggcatgcacggcggacacggcgccgcgccgctgccgcccggctaccggtactgccgcgccggcctgcggggcggcgcgcccggccccggctggccgccgcgcccggcgcacgtcaccaaggtgtccatcctcaagcgccgcacgccgccgcgcccgcgcgccgcgccgcagcacgacgccgagcccgcgccctctgacgcgcgcggctatgtcgtctatgcgcccgatgcgcgcgacgccgacgacgtcgaggacctggtggagcacctggacgacgacgacatcgtgctggtggagcccgacgccgtctcgcccgaggagcgcatcgccaccgaggaggacttcgaggagctcatcgatagtggcaagccggacgacgaggccgaggaggaggccgagcgcgcccccacccgcaccgagaccaccaccaagaccgtggccgtcatcagcctgtccacgggcaagcagccggccagcgtgcagcagtacaagatcctgagccccagcgggggcccgcgcgcccgcctgcccctgctcagcgccagcatgctgtcgccgcactccaataccaagatcctggacgaggtgtcgcaggccacggtggcctccgtctcgatagctaaccaaactatctcagtaccggtactgaagaacctgtcggtgccgatcgctagtgtggctagccacgtggctggagtcgccaagtcacagatcaagaaggtgccactgaatttggccacgccacctctcactatcaacatgtcgacgccgccgctctcgaaacctattagttctgttataagcgtgatatcatcgaacatgccaaagactaccaatccaccgcgagtgcctgtctctatattgactcaacatcaagttaaacaaaaaattgtaaaaactatagaaaagccgatgatgctcgcgctttctaattctaaactatccagtttgtcagtgacacacgacgcaacactaccagctaaaatattccaagacgatgccgcctcgcctgacagcactgtgtcgtctgagaataacccggacaaggatctgaacttaaaccccatgtcatcgacatctcaacagctgccaacaatgagttctcagggcacatcacaaatggaccagcgacctgggatatttaaggaacctacaaaagacatcgacattgaaagtgagatcagtcagcaaactgaactcccgcacacgttatgcctcagcgaccgcacgcctttacttttgggtaaagcagatataaagagtccagatcctatacctgagaagatacctgacaatatcatggagggagacgacgaggacaaaccagaagacgacctgcagagcaatttacttctatcgtatagtaagagtatctcggagccgccgccacagccgaccatgccggaaactaaaatagaagaaaatgttgtgaaaacaataaaggcgatcgctaatcaaactaaagaaatggtaatagattcaaatatgcagattacttcagacatggcacaggattctgtgcaaatatcaatcccgtcgcccactccctcccaagagaggtacctgaacgacatcacgatgcaggaccaccacgagactgcggagagtaacaagcacgtcgagtccttcgaggacatgctctgcatactggagaacatcggcgacgacgccaagacatacggcatgaagcagccaaacccgaaacctactaatcctaacattcaaaatccaaatgtagctactcctaagcaagaacagaaagagagtcaagagcagaccgctttcgccaagcgcgagccagagagactggcgctgcagtcggcgagcgtgccgcagctgtccccgctgtcgcagcccgccgagctgacgtccaccatggccaacgtgtcgcagcagctgcggaccatcatgtcctcgctcagcaccagcaccaccaaggtggacacgcagcctggcctgcggaagaacagtgacgccaccacacccacacaagtcaactttgaaaatttgttgccgtcttccaaagtggaagtggctgtatcgcgaccctcgcctatacagaggattgacaagccccctgcgaccatctccacgtcagatagtttgcccatgagtgccgctcaggctattggctccagggtcaacacgctctcatcgatgggtcaaatgagaaagtctccaaccgtttcaccaatcaattctccagtaagtctacagaactctttaatgaagtcacccgctcctatgaacacgaatccatcgttttctcctatggatgaatctggcccgacgtcggtcgcctctcaaatcatccaaatgccagctctctcgaagatacatagttctaccgcaccacctactataatgcactcgaataacactatcactactagcatgagcaactaccagaagaatcagtcactaccgactagcatactcggtcatacgttgctacaaccaactagacaaataaatacgagtaacttaccattcaaccaacagagtattagtactagtcagccgccggccctagtcatgacttctagaccgatgataggtaacaaagaacccgcgccgaatgtgacagtgcgcactcatagcattgtgagctcgggaataaaccaaatacaagctaaaccagctccaccgggctccattaactttatcacgtcttccaaacttctccacacgcaactgacttcacctttaaaacgctctaaatcgactgatgagccgaaaagtgaaattattgtgggccacatacaaccaacgaaaagacacagcgtggaggccgtcgttgtaaaatctgaacctatggagacagacgagccgaatacatcgacaactaccaccacggacgcgggcagcaagcacaccaatgtgcaacaatgtactgccaaccagaagaatgacgaatcccagaatgtgttgctgaagcaactgctgcagactactaccaccgccgccaccgtagtccccgcgcgcaccatgaccatacagcggactgcgcctgcgctcggcagcataccttcgctcgaagctcagctggcgagaccctcgataccaccacccacactgtcgttaacacaagaagtagaaatagcaaagaactcgccgcggcataatattataaccagtagcgtagtgaactcaccgttcacttcacgtcctatacagtccattccgacttccactatatcgcctttgacacaaacctcgacgcaatctttgatggatgttcgcaagccacctatgaagatgatgaccaaggaagaaactacgcctgtccctgaaagttctcccacgatgaagtcgatgcaaatgtatccaatgagtattgaaaatcagcagcttcagcaagcgatcaagaaagaaatcgctccgcctcaacaaagtcctgttcacagaccgtttacacctatggatgtgaagaaagagctgctagacgagagctcgcagcagtcggcaacttctggtgtctcgacagcatccgatcagggtaaacttgaccaacccatgaaggaggagtttccggaaagcgtcaacatggacgcgtcatccgaggtcaatgctccagaaactccgtcggaagctaagaagcgaaagcgccgagaatatcagcagaagaaacggaaacaattacaaatgaacatgaaggccgctgctgaaaataacttgactgcagcgaacgctaagaagaggccgcgcaagggctctcgctacgaggaggactatgacacatttattgacaacctgatggctcagttacggttactgcctgcaatgcaaattcaagaaccagctcttactactaactttgctgtttgtccactatttggatccggggatttgacgaaattaaaaaataaagactatgatgtattaaaaggcgacttagttggcgaatttggtaatgccaaaataccaaatgttggagattattataatacaaaaccatttggggaagaagaacccctgcctgaaaaaccaccagcatctacgcaaagaggattctatgaccaagaattccaacctatcttgtttgacgatgacccagaagacaagaaactggactttatttgtaaagaacgcgacacagacacgcctgacagcatcgtcagctgttccagtcctgaatgccttgaaactgagccaccaaacaggttcccaggccttaaattgattgacgatgaagaagaggatgaggatagtgactcagcgtccggccggatatcgcctataattcccatcattgcacctgtgcccatcagagtgaagccagtgtcgttgtatcaatcgaaggacgatgaagacaacatgaaggcgttgaagacactagacaccgatgccgcgaaggtcaagggcggagactcgcccggcagcacggaaaccaatgagaatgtcaccgtcacgctcacactcacgtcgggtgcggctgaagatattctgggcgtattgaaagagctcgccggtatcctgcacatacctccacccacatcatatcaaattatagaaagaactgctactccaccatctcacaaacttggcctctacagatctaagggcaaggacggaaaagaagggacacctattgatattcagagtatattaaacggagcagctaagttctgtcgccattgcgacgttgttattttagactcggtcgttagagctaaagcttcagagttcccattactatcggctaacaaaggcaatgctgaggaaattctgtgcgacagtgattcagaactttacttctgtagtacacagtgttacgagagcttcgcctggcgccctaccaatattatcctcgacggaaagacaaagaccaccgtaaaagatgataacaagtcagatgctgacaccaacttgtcgaaagacagggacgacttcgacactgcatccacagagagcatggaaactgatgacttggatataaaaccagacatcaaggatgaaaaaatggacttgtcgttcatggattccctcgacaacgacgaattgatgaaagaagtgggcgacgacgtcagcgcgctagacgaagacttgaagagtgaacaagacgagaagagtaaccagagcagcgagaaggagaagtacagaggggtgcgctacaaggcgtggtcgccgggctgcatcgggccgcccgtgaagtacaagcggcccaccgaccgggagctcacggagctcgtgttccgcaccggcgtggccatcatgcccgtgaccaacgaggacgtgcggcgctgcgagctgtgcggcatccagggcgacggcgtggccgacggcgtgtcgcgcctgctcaactgcgacgtggaccgctgggtgcacctcaactgcgcgctgtggtccgagggcgtgtacgagaccgtcagcggcgcgctcatgaacgtggagacggcgctggcggccggctccagcgccacctgcgccgtctgccgccgcctgggcgccaccgtgcgctgcttcaaggtgcgctgcggcagcgtctaccatctcggctgcgccgtcaaggacaactgcgtcttctacaagaacaagacggcgttttgcaactcgcacgctcccaagaatgaaaaagacaacgaattgacgaccctgagtgtacaacggcgcgtgtacatagcgcgggacgagcagcgccaggtggcgtcagtgatgctccactcagacaccaaccacctgatccgcgtgggcggcctgatcttcctcagccccgggcacctgctgccgcatcaactcgctgccttccacacgccaaactacatctaccctattggatacaaaatcgtccggttctactggtcgatgtcccgcgccaacagccgctgccgctacctgtgctggatcagcgaggaggcgggccgcccgcgcttccacgtgcgcgcgcaggacgagccgcgcggggagaccgccgcgcccacgccgcgcgccgcatgggccaacgtgttagatgctgttgcggctctacgtgaaggtcgcagtgaagacggagtgcttaaattgtggccgaattatgtgacgggagaagatttgttcggtctgactgaacctgccgtagttcgagtactggaaagtttgccgggtatcgagacgctgacggactaccggttcaagttcggtcggtcggcgctgctggagggcgggctggccgtgaacccgtcgggctgcgcgcgcagcgaggcgcgggcgcgcgcgtggcggcgcggcggcgcgcgctcgctgctgccggccgcgcccgcgccgccgcccgccgccgaccaccccgcctgcccctactccaagcagttcgtgcacaccaagagctcgcagtacaagaagatgaagagcgagtggaggaacaacgtctacctcgccaggtccaaaatccaaggattaggtctgtacgctgctcgagacttggagaagcataccatggtcatagagtacattggagaaataatacgctccgagttgtcggagatacgagagaagcagtacgaggctaagaaccgcggtatctacatgttccggctggacgagcgccgcgtggtggacgcgacgctgtcgggcggcctggcgcggtacatcaaccactcgtgccaacccaactgtgtcgccgagaccgtcgaggtcgaccgacatctgcgcatcatcatcttcgccaaacgacgcatcgcgcgcggagaggagttggcatacgattataaattcgacattgaagatgatgctcacaagatcatgtgtatgtgtggagctcctaactgccgtaagtggatgaactga

SEQ ID NO: 244 - DNA, 2079 bp, Spodoptera frugiperda
cattgcaaaccaatgtgtaaacgttgatgtaaataatatatacataatgagataattattatttatcgataggattactgccaaaaccagacaagaatgaatgtatattcagtgatagtcagtagtcataatctatcgaagtcgctcaagcttttgaaattggttaatagtaggagatactttagcaacatgtctcagaaaataagtcaaaataaaacatatatttcagtagaaattccggaaacaaccaaaggtgcctcaagaggatttttcagtagaatttttaaaagaaacaaagaagtaaaagaaaaacaagaacctagattgaaaaaatccgaactcaagagattgttttctcttgccaaacctgaaaaatggaagttaactacagcaataggtttccttgtagtttcgagtacagtaacaatgtcaaagtttaggaaaaatattagatattatatatgtgggtagtggagactcagatgcagcgagagcacggttaaaccaagtgtgtggtatattgctaggtgtgtttgtgttaggggccatttgtaattatgccagagtttacttaatgtctacagcaggatatagaatgacaaatgctttacgaagacaagtttttggtgcaatattaagacaagaacaaggttggttcgacaaaagacctacaggtgaacttgtgaacagactgtcagcagacacacaaatagtaggatctgctttatctcagaatatatctgatggtttaaggtctctagtcatggtatttgctggtacaggtatgatgttgtacatgtctccacagttggcattggttggtttagcaatagtacctccagtagcagttgttgctgtgctttatggtagatttgtgagaaagatttcaaggaaagtccaagattcgttagcagattctacaaaggtggcagaggaaagaattgcgaatataagaacagtgaaatcatttgcacaagaacctagagaaataactagttataatatttcaattgaaaatgttcttaagtattgttacaaagaagcaaaagcaagagctttattttatggcatgacagggtttagtggtcatattataataatatcagttttgtattatggtggggtgatggtgtcttcaaataccataacagtaggtaatctctcatcattcctactatatgccgcatacattggtatttctgttggtggattatccagtttttattcagaactaaacaaatctttaggggcagcaaccagaatttgggaaataattgacagaagaacccacaattcctacccaaggaggtttaattccaatgacagacgttgagggtcatattgagttcaaaaacgttaagttctgttatccttcaagaagtgacattgaaattttcaaaagtttagttttggacatccaaccaggcaaaacgctcgccgttgttggtcctagtggttcgggcaagagtactttagcggcgcttttattaagactatatgatcctatagatggggcagtatacattgataaccagaatattaaggagttagatcctgcatggattaagaaacacatcggtaccgttagtcaagaacccatacttttttcttgttcgataaaggaaaatatactgtatggagcagatgatcctcagaaaatcaatgatgacgaatttataagaatttgtaaagaagccaatgtttacgaatttgttcaaaacctacctgaaggttttgaaactgttgtaggagagagaggggttatgcttagtggaggccaagagctcttatcaaaaatccaaagatactactgttggatgaagccactagtgcgctggatgcccagtctgagcattatgtacaggaagctttagatagagttatgaaaggcagaaccgttttaaccatagctcatagattatctactattcaaaatgccgatattattgccgttctacaaaatggacaaattgtagaacaaggaaagtacgagcagttactacaaagtaatggaccttttagagagttggtgcaacatcaaacgttttcgcaattaatggatgactgatttttaatcac

SEQ ID NO: 245 - DNA, 1320 bp, Spodoptera frugiperda
aaagttcagggtttacatgaataaagctgaaaatgaagctggaaataaagccatagattctttaatcaattatgaaactgttaagtatttcaacaatgaaaagtatgaagctgaacgatacgattctgcattacaaaaatatgaatctgccagtttgaagacagcttctagtttagcactgttaaattttggacaaaatgccatcttcagcgccgctcttagtgggattatgattttagcagctaatgaaattgttaaagggaacatgacagttggagatttagtgatggtaaatggactgctgtttcaattatcaattcctttaggatttctgggaagtgtatatagagaagtgagacaggcactaatagatatgcaaactatgttcactctgatgacaatggatagtgccgtaaagagtaaacctgaagccccataccttcatgtcgattcaaaatcttcaccgataaaattcgaaaacgtgtcttttgagtatggacccggaaaaacaattttcaaagatttaaatttaacaatagaacctggcaagaaagtagctattgtaggtggatccggatcaggaaaatcgactcttgtggtggatccggatcaggaaaatcgactcttgttagactgctgtatagattttatgaaccatcgaaagggcgaatcctcataggaaatcaagatataagagatgtagacctggacagtttgcgccgtgcaatcgccattgtgcctcaagatagcgttttattccatgaatcgccattgtgcctcaagatagcgttttattccatgatacaattaggcataacctccattacggtgatcttcaagctacagaagaagaaataatgaacgctgcaaaactcgcagaaattcacagttccattgtgacctggccccaaggatacaacacgcaagtaggtgaaagaggattgaagttaagtggcggcgagaagcagagagtagctatagcaagagcaattttgaaaaactcccctattctggtgtttgacgaagccactagttctttactcccctattctggtgtttgacgaagccactagttctttagactccataactgagcataatatactaatggcactgagaaatgcaactaagggacgtaccagtatctgcatagctcaccgccttagcaccatcatggacgcagacgaaatcatagtactggaaaatggtcaagtcgctgacagaggaacacacaagtcactactggaaagtcattccggactatattggaaattgtgggaaacgcaaaatcaatcgcacactgaaccagaaaagaaaaaa

SEQ ID NO: 246 - DNA, 4341 bp, Nezara viridula
cggtttcaatccaacccgggctggatagttgtaatatatcaaaaattcaatattaactttgaatatacattctacagatatttttattatgttttaaactgacattgccgattagtgatatcagtcacctatcgtgataaagccgacaagtgtcattgataattagaagtttgtaaacagtgcggttcgatacgttgatgatttacttatgaatacttcttcaccctttaaactcactcgtattgtcattcagccgagtaaaccaaaacaggatatgaatgaaaaaccgaacgtaaacagattcctagaatggtggtgttaacttatcgattttacactcaacttgcaatctgactcgtagttctcagctagaatcatcgtaatggatacagttcattttccccacatatcagctgatattctatagataatactggataattgcgaaacgaggaagtttgatattgtcaaacaaaatcatcttagctcccactataatatggtatctccactttcatctgagaggattctgattccatggattcataaaagatttaaaaacttaaaagttaggagtatatacaaccagattaattattatgagagaagaattgataactaactgtgagactgagtaactaagtgcaaatagagaaatggcagtaccattccaagaagtggcacatatccatagggacacagcttctatggttggaaaatccttcgcacaaccagctcctcctgtaggaccccctggtgctcctgcgggaggtggggccccaccaggtcctgttggagtccctccgggagcaattgctctaattccacctcagcctcctcatcaacctccagatttgcccatgttcacctgtccacgtaggcctaatcttggccgagaaggtcgacctatagtgcttcgtgcaaatcacttccaaataactatgcctcgaggtttcgtacatcattatgaaatcagtatacaacctgataagtgtccccgtaaggtcaacagggaaatcattgaaaccatggtccatgcttattcgaaaatttttggaaaccttaaacctgtttttgatggtagaagtaatctttatactagagatccactaccaattggcaatgataggatggaacttgaggtcacattgccaggggaaggaaaagaccgtgtttttagagtagctataaaatggatggcacaagtttcattatttgctttggaagaagcactagaaggaaggactcggcagattccgtatgatgcgataatggccctggatgttgtaatgaggcacttgccctcaatgacatacaccccagtgggaaggtctttcttttcaagtcccgacggttactaccatcctcttggaggtggtcgtgaagtatggtttggattccatcagtccgtcaggccttctcaatggaagatgatgcttaatattgatgtgtcggccactgcattttataaagctcagcctgttatcgaatttatgtgtgaagtgttagacataagggatatcaatgagcaacgaaaacctttaacagattctcaaagggttaagtttactaaagaaataaaaggattaaaaattgaaattactcattgtggaactatgaggaggaagtacagagtctgcaatgttacaagaagacctgcccaaatgcagtcgtttccattacagctggagaatgggcagactgttgaatgtacagttgctaagtatttcttagacaaatacaaaatgaaattaaggtatcctcatttaccttgtcttcaagttggtcaggagcacaagcacacatatctacctctagaggtttgtaacattgtggctgggcagagatgcattaagaagctgactgatatgcagacatcaactatgattaaagctaccgccaggtcagcgcctgatcgggaaagagagattaacaaccttgttaggagagctgatttcaataacgacgcctatgtccaagaatttggactggcgatatcaaacaatatgatggaagttcgaggtagggttctgccaccaccaaagctacaatatggcgggcgggcaccaaacctcccaagtcagctcgaataccaaggcatgttgtctgcaaaacaacaagcacttcccaaccagggagtatgggacatgcgtggcaaacaatttttcactggtgttgaaataagggtctgggcgatcgcttgttttgcacctcaaaggacagttagagaagatgctctcagaaacttcactcaacaattgcaaaaaattagtaatgatgctggaatgccaataataggccaaccttgcttctgtaaatacgccactggtccagatcaggtagagcctatgtttcgttacctgaagtcttccttccaagcattacagcttgttgtggtggtgcttccgggaaaaactccagtttatgctgaagtgaagagggttggagatacggttttaggtatggcgacccaatgtgttcaggcaaaaaatgtaaataaaacttccccacaaacactctccaatctttgccttaaaatcaatgttaagcttggaggcattaacagcattcttgttcccagcatcaggccgaaggttttcaacgaacctgtaatatttctcggagctgatgttactcacccacctgctggagataacaaaaagccttcaatagcagctgttgtaggttccatggatgctcatcctagtcgatatgctgctactgttagagttcagcaacatcgtcaagaaataattcaggaattatcctccatggtcagagaacttttgataatgttttacaaaagtaccggtggctacaagcctcatagaattattttgtatcgagatggtgtttcagaaggtcaatttttacatgttttgcaacatgagttgacagctataagagaagcttgcattaagttagaaggagattataaacctggaataacttttattgtagtccaaaagagacatcatacaagattattctgtgctgacaagaaagaacaaagtggtaagtctggaaatataccagctggtaccacagtagatgtgggaattacccatccaactgaattcgacttctatctttgtagccatcaaggtattcagggcaccagccggccaagtcattatcatgttttatgggatgacaaccattttgattctgatgaactgcaatgcttaacttatcagttgtgccatacatatgtgaggtgtacacgttcagtatctatacctgctcctgcatattatgcccatcttgtggcatttagagctaggtaccatcttgttgagaaagagcatgacagcggtgagggttctcaccagtcaggctgcagtgaagaccggacacctggcgcaatggcacgagctattaccgttcatgcagatacaaagaaagttatgtacttcgcataacctaagttgcgagaaaacttcctgccatgtgggattctaggaaccagccagctattattcaatggtctcttgaattgtttatcttcttttgaagaggttttatcgctgtgttggtcgtcctatttattaagatttctaatattaagctaattattgtatgattaaggaacctataaaactaaaaaagcagtgatagttatattttcataagagtcaaatgaaaacactgattcatatttcttaagtcaaatttcactagttggaagaaaactaatggaggaaagctgccgtttaaagataagtcttctttagctggtgcacaagtctaggcatgtaaataggtatagggctgtcaagagagataagcgaagtaacctatattaattagtagataagttttaacttgttccattttgcttgttttttttttgtttttttatatatttattttctatttctctctttatttctctcttaagccaaggtatccaagtcagctattatttgatattctagctagctattattcttttattttgagaggatgaatataccaaatggttgtgtagtcatgtctccaggcgatgtactaaagtcagctttaagttagaacaggtctgtggtgatttagtgtgctcacttagtcgtacttaaaaattttaatctgcggaatgaaacaatgcaaaagaattgttatttttaattttgttcatattaatgttattaattttttatttacaaagatggatttgacctgtacttgttatttgttagattttaacatttgatgaatttttattttatttttcttttctttttacttgattatttattattatgtacacgattttcacaactttaagaaatgctggtattattttcttaatgagctacgattctgttttaaaaattgtatttg

SEQ ID NO: 247 - DNA, 2612 bp, Nezara viridula
tcactgttgaaatagaaaacagtaataattttgatgtagaactcctatccattttttctaatactgtttatcaaacacctcaaatattacttactagtcctaagaatacatgctgtgttatacctcctttcaagaaattaacatgtacttttgaaatagaaacaaaatatataggacattcagctatagaatatatatgggaattcgctggattcaaaatacccagaatgttcacgttggaagttacaagtacagaattgaaagaaatggagttgaaggacaagtacagaattgaaagaaatggagttgaaggaatcaaaaatagacattcattatcctcaattgaagatttcaggattggaaatattaaaccagacttatggggacaaattacctggccaaaagaaatatttcaaatcttctatattccctgtccaacttgggcagtattctttaccagagaaaatccttcttgctgctttacctcagaataatatgaactttcgatctccttattcagattgaacaggttataccttgtttgaaggaagaattatcgcctaagacatatttacaattctttagtggtttgttgtttcttgaagaagcagaactattgaaacagattggggaactgttcatggaaagggcccatttccgaaaagttggagattttttagttttagatatgcctttatactctgtatatgccaacaaacttatacctggtgataaagccatagcttctttaccttggaatgaccaaaaaaccagtgattttaaatttgagggtataatccatcgaatttcacaaactgagatatggattcagttttcaaaagaattccacaactcttataaacaggggactgaatactcactgtcttttatagtatcccgtgtttcgttacgtaggatgcaccaagctgtcaatttagctaggaagttccttggagaccaatggttattccctactggtgttcgaacatcttctcctcgattaatatttgataaattttctacaactgaagtaggtgttcagaaaaacaaatcatactctaaggtaaattggaacaggcagggaagtggatatggaaacaaatgctctattgagaatttgattgatgctgatattgttcctagaaatattgatgaaataaactggttcaataaagtactaaataatgaacaaaaagatgctataaccaatattctgaaaggagaagcaaggccgttaccatacatcatatttggacctcctggtactggtaaaagtttgacaatagtcgaaacaatacttcaacttcataatttatttcccagtagcagaatattagttgcaaccccttcaaattcagcagcagatcttttagctgaaaggattttagaatcaggaaatgtggaacaaaacaaaatgttgaggcttgttgggttatctgcttttgagcaagggaagatcactgcatcattgataccatatactgcaatgatatttggaatccaagttatcactcgtgaagctatcaaacagtttaacattattattggcacaattggttgtgttagcattttattcaatttgggatttccaagaggtttctttactcacattattgttgatgaagctggtcaagcaactgaaccggaaatactcacagtattgattcttttaaatattcagagtggtcaagtaatattagcaggtgatcctttgcaacttggcccagttacttattctaaattggctataaaatgtgggcttcaagaatcacttctctcaaggttacttgataggtttccgtacaaacgtgatttagttggttttcctaaaagttatggttatgatccccgttacaaacgtgatttagttggttttcctaaaagttatggttatgatccccgtttggtgactaaactggtcaacaattacagatcactaccatccatattacagttaccaaatatgcttttctacaatgatgacttaattccaaatataatcgagaagtcaagtgaagaaagtattttgttaagtagattgaggcttccatttctaattaaaacagatggaaatgctcctccacttgttttccatggggtgcagggtacaaatatgcaggagaacagctcatattcttggtacaatcctcaagaagcataccaagtttttatttatttaagttcgctgtataaagctggtttatctcctgatcacattggtattattacaccctatcaattacaggttttgaagatacgtcaaatgctggaaaagcttaatattgagcctcctaaacttggatctgttgaagaatttcagggtcaagagaaaatgatcataattatgagtgttgttagaagtaattttgaattcattagttatgacactcaaagagcacttggctttgtgaggaatcctaggcgcttaaatgttgctatatcacgtgcacgtgccatgcttatcataataggaaatcctcatcttctgtgttttgaccaacattggaagaagattataaaacattgtgttgcaaataattattatactggttgtgatcttccttctggtttaatatgaaaaaataaaggctgttttttaattttactttttg

SEQ ID NO: 248 - DNA, 521 bp, Nezara viridula
agcactaattacagaaaacaatgaaatggtagaagaattaaaagcaaggatgactgccgggtgctgttttacaatgcgaaaaatattgaattacagatctctttctttcagaacaaagatcacggtgtatgagaaagacccgtcgtcacctatggttctgagacttgtgatctccaaagcatcggaaaaaaggctaatcgcatgggagagaagggttctccgctggatctatggcccggtgtgcgaacagggacaatggagaattcgcactaataaagagctgtatgaaatgtatgcgaggccggatttggtctcaattgtgaggggaaaccagatcagatggttgggccatgtggcgcgtatgccccgagacgcgattcccaaacgcttgctagaggatcggcctgaattcgaagatggagaatgctcgctcgggatagaggagagtggcgaaggatcataagagaggcccaggttcttacaggaccgtagcgccattacaggaccgtagcgccataaat

SEQ ID NO: 249 - DNA, 6564 bp, Nezara viridula
gaggctatctgggctatgataattgatatatcgtataaccactactactttgaactgtgatcatactgaattttgtacaatataattttaataacagtgattacaataaactttccaaaattccggtccctactaaaaaacgagagtgtgcctacccgggtagaagcgaggcaggcaaaatgaacactaaacggaaaaatcgttcaaactcgaactctgccaggtctccaagagctcgtggaactgaaagaaatgttgctctggatggagtctataataattcatactttatgaattcagttacatcattagttggtagtattataaaggtgcatacatctacaggagttatatttgaaggaatatttagaacattctcagctcaatttgaagtggtggtcgaattagctcataaagttgatccttctaatcctctccaaattcatatagattcagtaatagagaaaataatatttaaagcccctgatattattaagcttgaaataatcgatgcggatattgattatgctacaagagatacctttcagactgatactgccatcagtaaatttaatggccaggtaactgaaaaggaattagagccttgggattgtgcggggaataatgttgatgaatacgaattagatggaactacttcaaatggttgggatgtaaatgaaatgtttcggcaaaatgaacagatgtatggtgtaacctcaaattttgatcatgggctttctgattatacaacacctctccagaacaaagattccaaagattacaaggatgctgaagcaaaagctgctaaaatagctaatgaaattgaaagtaatcctaattacaaggtacgtatagacatggaaaatggagaggaggaagataaatatgcagcagtagttcgcccatcttcctcagacagcagtcctaatagtgaaggaaataagtatgtctgccccccaaaaaggaaaactgttcaatcaaaaacaaatgttaggacatcttctgtgcctcctgttcaagtcggcaataacaattcaatcaaatcatcttctaattcttcatttcctcagcatcaccctccagcatctcaaactgttactcctacaagtttgactaataataattctagagagcgagtaaatggaatatctgaatctccaaaaccccaaagaacaaccttaactacaagacatgcacgaagttttgcgagtagtgagccttctcgtttcaatcaaacacaaaatgttaccacccaaacgacaaccccttgtaataatgtctccactgagacatcacgaagttcagtcaatcataaccacaaccacattaactattcaaccaataatgtcatttcatcttcagatcatcatcataggaaaccaccaattttacaacatcctcctgaacaccaaggatctacatcactaaatattcctagaaaagtatctagaggtagagatgatcaaatatctgaacttaaaaaatttcaatcagatttcaaatataatgaaggaactgaagagaaaaaaccaacagcaaatgaatcagaaataacaaacatccagaccatttccagaactgtagaaacacctacagaagctactatttctcgaccttcttcgggtggtaatccagaatcaactgattcaaaagctttaaaatctaaactgaatcccaatgccaaagaattcatttataatccaaatgcaaaaccattcacaccgaggtcagctagtactcctacacaatcaaggccacatacaccacaaactcctggatatggagggcctgttccccccttgcaggcaatggtaatgcctacttatgttgttgcagctgcacagtctccttatgctcaacaacctaaccaggcaaacagatatcgtaaagttcatatgggcatgtctcagccttctcaaatgcaagtggcagctgcaacaggacaacctttattagctcctgcgcccatgcatactcaatttactgtgccttattcacctcaagcacatattgctcctcagccatatcagcagatggtgcgaatggttgctcaacaaagtggaggtatggtgcctcctgtgttaacagccataaattatccacctgaaggtactcaaacacaaatgcagtttatgggccctggaagtattggtccccatccacatcatccacctcatgttcatcccagtcaaaatacttcatcatcaccccaagctaatagtggccagcttggtaatgcatcttcaacttcaggaggtagcaatgcaagtggtggtggtgtttctaattcaagtgctggtccacccccaccttcatatcctccttcaccagctaatagctattctcaaccaccacctgctggtcctggtgcacctcaccctcctaatccaccacatcatacatatccaattctttgtcctatgataccagcccctccacctccaccacatcctgctcctcatactccacatcatatgatagctgcagcagctgcacagtctacagtccagacttacattcatcatcatcatcctcatcaacattcagcagctgttggtaatcagcaacaccatattcaagttattcttcctcacagccaatgatgacaacttcataatagagtcatatttaatttaatgttaaaaaagaagaagaaacccactagatgagggtgtatgatccttcctgtggtcagttgtcaagtttaagcattatgaagcttggcaactaaattttataactgcactgtaattcctttttttagaaaatattgtaacaattaataatatctgttccaatctctaaattcaatcattcatcatatcatattgttttttaactcaatgagttatgttttaaaaaaaaaaaaaactgaaagtagttttatgttaatctaatcattaataagtatttgttttatgattcaatcataaataaagcccagtttacatttgaatcttgtcagtatatagttaacagagatacaatataactgcctttaatatggaatatctatattctaatatagctttgaagcttattttttttattatcatactgctttctcctttttttttggagcattaaaatttttgaattgaaatataaatttaaaaagtgttatatcagtttcagttttgttattatcgatttaagatagattttgttattgaattcaagtagtttaactttttaaaatagtaaactgctttgcttaggggatattttattatactgttagcaattggagcattgataaccgtactttaaaggatatcaatgtaaaatgcaataataaaggaaagtaagacttatatgtactcttatagtatgtaaatatatcatcatttttttaacttgttaaattcaaaagttctactagaaaatttagtaaacattaaataataaaattataatcatatctaaatagtattattattgtttaatactattttaacgctttataagcgtaagctaaaccactagattcactttgtgcctgattatattgttaaatttaagatatttttttaaactaaaatttttgcataagtttatattaatcaatttagataagctgaatgctttaacagttaattaagctatcataataaatcatatccaatgggtttttttcttatctatttggtaaactgaagcagatgatttgtattgactctcaataatttcaccagtaaagttctctccacaaaggtgcatatgtacacttgtttataaacatacaaattactacagttgtcttcttgttactagttgaagactgaattagtttaatatcaagcatttttgacgtttatatgtttaatcaactctcatatttgccagtagctttgaaatgagcatatattttgtaaatgcatatcttactctcattttcagttttcagcattagattttttagtctttttgtttattcatggcatttttatttgtggtaatcttaaatatatatctgatttttttgtgagattatataacactttaaatttaaaccttatcaatgctacttgtgtttctttttattacataatattattctttattattttttttttttatacgttatttaattttggtaaaatattgtttttgtgaataagtgagtgagagaatataagaaagggcagtgttcataatttatttgacatttcatgacattagaataaaggcaataataaaaaggtaatattgtttaaactcaaattactgataacaagcagtttacatatcatgcaccgagattataactgtttaattcaaaaatttaagttttgtagttaatcttttatttggattccacacagttacgcatactaataaaatagatttgtcagtattttgatgaagtactcaatattttgggtttcaatatattaacatatgttgcttattccaaattaaaattttattttaacttattataaattccactttggaattaatgtaataaattattaaaaatctctatttttgagttatactgtgtttatttagggatagaatatgtgatccttgattatttgttaattactttcttttgttttgttgttatggttcagcagttattgttcttttacaattatcacttacttatcctatacttgatcataattactcaaacaattaatagcatgtaatattgtgggtctgagtttatttaagttttcttttatattttaaaaaataatcatatttttttcaaatgaaagcaccataaaaaaatttcaaccattttatttatattattttagtgaataaacacacccacacaaatttatatgaatatgttaattaaattcatcttaattgaattaaaactaaaagtaattattttataaaatcataaatcctgaattgaactcttaatgttttaatgttcataaattatttataataatttcctttttctttttattatcgataaacaattaattatattaattttgattcacaaatgcctatttaactgaaccggttcagattcttagaagctcttagcagtttcccgtgatatagattatatccaaatttttaaggaaataatatttataatacttgtttaattttccgtgataatcacaaacagaaagtaaatggaatacatattcatttgcttagtgccttttaatatattgcgtgtctggccaataaatcaatcacattgaacaattcaaattttatattgttaggataaatttatttaacgacagaagaaacagcatataaacatttgcatattatttttttctttccaggctaagcttgttcaaagaatgttcatgggattcacactgtgtaatgtttttgacattattgtatatatataaagttctgcagttatatttgaaataatgtcggaacatgcaaacactctgttcttgtttttctatatattcacatttattaaataatttataacttaagataaaatgcagtacagattgcatttttagatgagtaggacgtaatattactcactataacttaaatttacatcccatttactttaataaatattaaatatttcaattttaaagcattacgttaagataatgactttttaattttaattgataccatgtatgatatcaagataaagaaagaaaaacatagcagagacagccttatgttctaaaaagaaattgtaaacatttgtattttaatctcaatctgcaattgaactgttatggtaaagcacattatcttctgttgaaatcatatactaacaatatacgtttatttaacaatatttacaaaaataaattgtgtactttttcttagtttgagaaatagtcataaggatagacaccaaggtatttactagaatattaagaacactcaaccaaaaaattgagtgaaatataggaattaacactgtttatctatatattgtatagttcctaaaaaaattgaaattgaactttgaaataataaacttttaaaaatatgaaatcatttactaagatatgcatatggttaattatagttagataaaatttatttgtttatttcagtgtacttttgttgatacaaatacattattgatttcttgaaaaatgttgagtatataaattatgttataacatacctttatatttaggattatatgcttctctgtatacctatatactgtgtgtctttatatgaacaaaaaaaaaaaacaaacaaaaaaactgttatttggtaataatgtagtatttaaaaaaaattacatttgtgatattttatggatagcctgtaagtttgtctttatcctgagaagatatgtaaactgagctttaattgtgtattttgatctattcatttgttactttttgatttatttgaataggtaagttattgcttattaaagtttgtttaacaacctttaggaaattgcacctatagatatacatactgcattccatttgttggacaggtcatgatataaacagaacattgtcatagactttaattatttcatgattgtaattcagtgctaacagttaattatatgttaataattaaactttagttaaaaaatttaatttatttcatccctac

SEQ ID NO: 250 - DNA, 1888 bp, Nezara viridula
ctatctgttgattcagcaaggtattgcgactatggctaggctatattgtctgcattgaccgtttgcgtttattgtgttaaggattaaatatggcgaagtcggctgaggtttctatgaatgtgtcggccataaggctgattgataggcttgttggtgatattgtggacacagctacgcacgtagtactttacgagtttaatgcccaaacatacgaatgggaaaagactaatgcggaaggtgcgctgttcatatataacagaaacggtgatccgaggtatagcattatagtattaaatagactcaataccgaaaatttagtagagccagtagacgagagtattgatatacaattacaagaaccctttcttttgtatagaaactcgaggagtgaaattcatggtatttggttttatgatcgcgatgagtgtgtaagaatagcaaagactattgaaagactagtcaaagaggtaactaatattaaaaatttgatggaatctagattgaaaggtagtgatttgcacaaagctcagcccgaaactcctgatgggacttcaaaaagagtgatggatttctttgctagggcaggatcgaaagctccttcacaacctccaggaatgagagttccgccaccaggactcccttctatgtctagagacaagcagttatctgaagtcaaccctttgttacagcgattaatgtctaatcctaatcctataactgttgaacagttggaaaaacaacatagaagctcgcctcaagacattcaaaagataagagcaaaacccggaataatgaagaaagaaaaccaaaggaggcctttgacacttcccgttcataacagccccaagattgaaaacggtatgaatttacttaatttaggggaatcgccaccgcaggggtatacaccttcctccatatcaacacagcatttcttcaattctggcattacacattccccttcagaaccgctggaagtaagcgttttggaacagtcaatggagacgcctaccaaacctgcccttatacctccagtgatgttcgcctctgcgaaagaagagacacctctggtcgtaaaacctgagccattaaccaaaagtcagttactgcaagcagtgacctatcttctgaagaatgatgcagatttcataaataagcttcatgaggcttatgtgaaatcgtttgttgacatggtttcctaaggtaaatatgtaacagcgtctagatcaccgaatgtaaatcagtattgacaataaaatacatacaagtaaatattttagctttaaatgtgggattgtgtataatgtcgatcaaggattcttccttggaaaatattgtatatattgtattaattttttttttagatttaagtattttttatattttaggccgaaaagagtgtagtagagtgtgttgtgagtaatgaaattttatatataaattactatacaatgctgtgatattttcaacccgtaacgtaaaggaggtatttattttctccttttaatctaatgggttctacgctctgtaactgtacgatattaggccgatttgtttaatttgatatgtataaatataaatatgtatgtatttagagaaaattcccacttgacttcaaattctacttgtatgcattcagtttgtcatgtttgtttttttttaattaaaaaaacagttttaattgtttttgttttatttttgaaaagtctattgaatatatatcgtacctgtacgagtaatttgattctgtgatttagacgtagttttaaaaagaagacatttgtatagtattttttttggcgacatgcgaaacatattttattttaagatgacgaagagctctgtatgcagtgattcaatctatgacgtcaataaatactatacaccgaca

SEQ ID NO: 251 - DNA, 1964 bp, Nezara viridula
caacaacttagttgtaaatacttgttttgggggatcggattagcaccatcttgttaccgtgttaaaagttttacttattatttttctaattattcgttaattcgaaattattctactttcatcagggtttatgaaatttgtttacatgagttatatgatataatttaccttagatatatttgttacattgctaatatgataagcaattgattttagacaggattaaatttcctgagtagcatgcagggtgacagtgtttattttgtttataaggactggaatggaatgtgaaagagttatacctcgtgacatacttgatgatttgtgcagccgcttcatcattaatgttcctgatgaagaaaggagagacctcattagaatatgttttcaaatagaatctgcacattggttttatttggatttttatagtaaacattttcctacaaaaaaaccatgtggcatcaaggaatttgctcaacaaatattcaagcatctgccatttcttcaaccatataccaacaatgtggagaaaataattgatgagtggaaagattacaaattttgtgtccccacttttggagctattttgttggatgaagatctgtctcatgtactgttagtccagagttattgttcccgatcatcctggggttttcctaaaggaaaagtaaataaagatgaacctccttatcagtgtgcaatcagagaggtttatgaagaaacaggatttgatataagtaatttaattaatcctaatgaatatatcgaagccaatgtaaatgaccaagttgttagattatatcttatacctggtattaataagcaagaaaaatttgaacctaaaacaagaaatgaaataaaagctgtaaactggtttcctatttgtgatattcctagtaataaaaaacaagctacattaaaacttggtattggtgctaatacatttttcttggtatctccatttttaagaagactgagacagtggatttttgaccataatcatcgttttcctacaaagcactttcgtagacaaagacacaaatcatgcagtgacatagattgtattaggtataaagcaagtgatttgaatcttaaagatagtgtggctatgctgaaaagtttgaaggataaaaagggaaatttgaaaaatactgatactgcatacaaagtggaagattctattaaaattgatgataagcagatagaaatattccagcctaatattctggaacagcccatacgctatgaattttctggtctattaaactctacaatcaatgattccttttataaaacctgtcacacaaaacaattttttcccgaacagtttcagcaaaagaatgactattccaacgttaaccaatttgataaattaagtaaaacaatcgttgttgttcagaataaggactcattatataataattttattaataatataacaaagatggaaacatctatttccgttttatcagaggaaactccagttcaagaaagttgtagtacttcttccatcaaaggtccccttaagcagaacattaatattctctcaaatgaatcagcatttcgaaaagtagagaaatcaggcaaaaacaagaaaagaaatcgttgtaaaaagtttatgaagtcaataaaatcagacgatgttaatattggccatctcgaaagtaatgtggaaaattcaacaaaaagctttagtttagaaaattcaacaaaaagctttagtttagaaaattcaacaaaaagctttagtttaggaaattcaacaaaaagctttaattgtttgacagatgaatgttctatggtaagagagattaatgaagtgtcaaaaaaaagtgattttgatacacaatttactaataaacaggatccaagtattgatgaacaaccattcattggtgtatctaggtgggttaatttcaaatttgatttaaatgctattttgagaagcatggaagaggtggctc

SEQ ID NO: 252 - DNA, 677 bp, Nezara viridula
ctgaagttcttgacagtgtgagtgtacgcttcctaatagatgtcgagccatttgatgtaaaaaattcagagagacttcttttcatcttggaggaagcacattggttcatgattgacaactatgatttcaaaaaattatctcttggtgagtttatatctataatgatgagccacaactgtataaagctgaatgtggcaaaggctctgcagcgctttgtaagatacaggcaatcaataaaggtttatggtgctgttctatttaatcgtacaatggacaaaattttggttgtgaaagaagatagaaaaataaaaaactatgggcttcctaagggcaagaaaagcaaggatgaagatggaattgaatgtgctattcgtgaggtgtatgaagagacagggtataacatcagaggcaaaatagtagacattcctatcactatctttgataagataacattctattttgtgtttaatgttgatgagaagacacagtttaaaacaatgtcaaataactagatttctgagataaaatggttggatataagcagactagatgaattaatgtctgataaaaggtatactctagttacacgatgttatgcggactggaaggagtttcacaagtcccttgtcaaaagcaaatttaaatttgataagcgcaagtttgaaagtataattgag

SEQ ID NO: 253 - DNA, 6664 bp, Nezara viridula
tatggttataacactgtaaatcagaattatttaggataggttgtattttatcaagagttatgttggtggtcttatcacgctcaataaatctaagttttcgaatataactgtaatgtggtgatcatatatttctacaataattacagaattgttaaaaagtgattttaacctatttcatttttcatttaattattaatggcatgttattttactgagaatgttcatactaaatcatttactcctagagaataccagattgaacttctggatgctggtcgtgagcgaaatattattgtttgcttaaatcctgggtcaaacaggacttttgtttcattaaaattattgctggaattgtcagttgatatcaggaggccttggaaatgtggcggaaaaagatctttgtacataggaaacaaatcttctgttcagtattatgcagaacttataaaacaattgacagatctccatgtaggtgattactgccatttatcacaaaaaataaattttgaattgcatcaggttctagcagtaacgagtgaagtcgttgctcattggataagtgctgaaaagattgtttggagtcgaataaaccttctaatcattgaagactgtcataatgctgtgaaaatccatccattaagagatttagtcttgaacttaaaagattctggaaataatcctagagtgttaggattgacttcaccactttttactggctgtaaagttgaacctggttctgttgaagctcaaataaagcagctagagaaagatttatgtagcaaagttgaaacagctagtgacattgtatctattttaagatttaatgctcacacaaaagaagtactattggagtgtcaaaatcatcaaccgtgtgaactatcagaagtacttgctaatgagatacatgatttacaagagttccttgttgaccatcgttatgatcctactgaaatatatgaagataattttgttgaagaactgaaagatatccctgatcctaaaaaagatcctttcgaaattattgatgactttttagaagtattaaacacaatgggaccgtggtgtgcagataaagctgctcttgtacttttagtacaaatagaaaaactaaaagtaaaaacaccatatgaaaggcattttttgttgctttgtcttgtttcttcagcattgctcaagataagggcaatctgtgataatatctttcaagatttaagtgaaactgagaaaatttataaatattcttcacctaaagtgcttcggcttattgaagtagttagacaatttaaaccaaacaaaccaatagaatctgaaccaacgacagagtcagttgaaaaccaattagttaataaagatgattgtgataataccccaaaagatgggattagtatcagttgtgaaaacaaagaatacgataactcatttacctctgaacagaatagaaattgtgtcacacttgtagatagcatcataaatattgatgacatgaaagatgtttatagtaaaaatagttcagctgaagaaattatacaattaaattataaaaataatattaattgcctttctaaaaattcagcttcacaaatcccatgctttatttgtggaaaacacaactgtagcggttattctgataatgatgtcaataaaaataatgatagttcttcaaataagcttttgtctgatgaacaagacgattgcttacccaaaaattcagatttcatcactactgaaaatggggattctaataatgagcatatcattcagaagtttccagaaatgattaataaaaataattctgatctatgctctaatacgtctgatgctgaagaaaaccataataccgaaatcgaaaagttttctactccacctgaaatttataatagccaggttattagtcaagttcccaattccattaatgacagtatagtttccaaaataggcagatggcgaggaagaggtaggggttggagacaaagaagaggtgctggaggaaatcaagggaagacgtttaaacaacaaataagtgatgatgccgacaatttatgtggtataatcttcgttgaaaacagattcactgctaaaattctttatcatctttttcatgacttacacaaaaacgatccagaatttgaaaatatttcaactcaatacactgttggaaaaattgcagatcctgctgttgatcctagagaagcagaaatagaacatagaaaacaagaagatgttttaaaaaggtttaggatgagagaatgtaacctcgttatagctacttctgtcctagaagaagggatcgagctacccaaatgtaatcttattgtacgatatgatcctgtccctaattataaaagtcatgcatacagtaaaggacgggcaaagcatcaatattcttattacatatctattatcgaggaggatatgatagataaatatttgaaaatatatgctcagtatatttgtacagagaagttactgcttaaaagaagtagtaatctggaagctactgatgaagaagaatcagaagcaaatgcttataccaatgcaatacctgcttttaaacctttggaaaatggtcccagtgttgatatgtcttcttctatcacgctggttaacagatactgtgctaaacttccaagtgatactttcacccgcttgactccaacatggtctattggggatattttttttgaaggaaaatttatgtattattgcactgttagacttcctattaattccccacttaaacaagatattgtgggacaccctatgcctagtaaagtgctgtctcgtcgcattgcagctcttgagacatgccgtttattgcatggaaggggagagcttgatgacaatttagaaccaattggaaaagaagcttttaattctggatttgaagaagaggatctttcacccatagcatgggacccaaatttaccaaggcctggaacaaccaaaagccggcaatattattataaaagaattgcaaattgcctcaataattgccgcccagttgcaggagtagattgttatttgtacaacatagatatggtacttacttgccctcttccagaagagcaaaatacaagaggtagaaaacttcatcctccagaactggccccacaggcttttggcattcttactcttaaagaaattcctaaggtttgtccatttccaatatttactagatctggtgaagttcaagtcagtttaaaactatgttccagctcaataaatttatctgaaagacatgttgaaacaatagcaacatttttaaattttatttttacctcagttcttcgcttacagaaatatttaatgagttttgatccacaagctaaagagaattcattctttattgtgcctacgaaaaaagatgacaatggcataaaccaagtggactgggatttccttgaagtaatttacaaaagaaaagatgaatgccctcatttaataacagatgaagatagaaaagattttacttttgatccagaaaagtataacgatgctgttgtgatgccttggtaccgaaatcaagaccaaccacagtatttctatgttgccgaaatatgttatcacctcaatccaaaatctggttttcctggaagcttctataaaacatttgaggactattacctcaaaaagtatggtattcagattcaaaataccacgcagcctcttcttgatgttgaccatacatcagctcgcttgaattttctcacccctaggtatgtaaatcgaaaaggtgttgctttaccaacatccagtgaggaaacgaagagagccaaaagagaaaatttagaacaaaaacaaattcttgttggagagctttgtgaagtccatgttgttccagcttctctttggaggcaggctgtctgtcttccttgtattttatacaggcttaatgcacttcttcttgctgatgagattcggacaaaagtcgctgaggaaatagggcttggtttaattaccctaactaaagaattcgagtgggctcctttggattttggctggagtttggctgatgtcttaaaaaaaaataaacaagaaattgaaaataaagaaacttcaaatattaaagaaattactgataaagatgaaggtttagaggctaaagaattattagatgacagtgaaaataaaatagttacaaagaaaaaagaagaatctgatgctgatgatactgacgatgaaacaaataaagattcagccaatgaagaagatgataaagataagggtgactggatggaaataggaacttggtctaatgacatggctcaacttggtgatgagtttcaaaaggacctccctcctgagctctcaatggtgcgctatggatctccaactagctggaatgttggtgaaaaccagccattcaactactatagctctgactgcgaatcagatgattcaagtgaaatatatttagaatctgaaacatctgattcttctgatggaggtgctgggaaattaaaaatcacattcaggggagattacttggcagaagccatcgaagataatgaacctgaagcaaagaaggaaaataataacagcatgaaattagatcttgaattgtggacctgggaaactgatgatttgattactgatgttaaggaagctatcctaacagagactgaagaatttcagaaacaaactgaaaaacaaatggaaatattaaaatcccaaaaaaaacttattaaaaaagaagagcagtttctagtaaataaagaggatgataaaaaacaagaaattgtatcgggagaaatgaagaattttgattttaaagtaagaagctataatatgccttcagatattatacctaaatcttcaaagaaaaagtctctatcctaccactatccagctgaaactattaataatcaagaaatagaggaagacatcgcatttagttttgatcaccagccagaattggaaggccatccaggtcctagtccttccattctcctacaagctctgactatgtctaatgcaaacgatggcatcaatctggagcgtttggaaactatcggtgattccttccttaagtatgctataactacttacctctattgtactcatgaaaatatacatgaaggaaaactcagtcatcttcgttctaaacaggttagtaatttgaaactgtatagactgggacaaaagaaggtatttggtgagagcatgattgctagcaagtttgagccgcatgataattggctaccaccatgctacttggttcctcgagatgctgagcaaaggctactcgattctgagcctcaagctactctcccatataatcttgttactcagcattccattcctgacaaaagtattgctgattgtgtggaggccttgattggtgcctacttgatagaatgtggtccaagaggagcattgttgttcatgtcttggcttggcataaaagttttacctaaagaagaaattgataccactactgatccaagtttagttcaacgtgttggaagcattaaaactgacgagaatatagtagtaaactttacaagtctttcagaacctatttcaccattgcttcgacatgtagatgacccggaaggggagttagcttttctcttggctggttttgaagctttggaatcatcgctgcattattcatttagagacaaatcatatctcctccaagctatgagtcatgcttcatattctcctaatagagtcactgattgttatcagcggcttgagttcttgggtgatgcagttctagattacctaattacaagacatctttttgaggataagcgtgcacatagccctggagcattaacagatttaagatctgcattagtaaacaacactatattcgcttctctagcagttaaatatggactccataaatacttccggcatctttcacctggcctagctgaagttattcaaagatttgttaccattcaagaagaaaacagtcatctcatcagtgaagagtactacttagttggtgaagaagctgaagatgtagaggtaccaaaagcactaggtgatgtttttgaatctgttgctggagcaatttttcttgacagtggcatgtctttagatactgtttggaaggtgtactacagaatgatgaaaaaagaaatagaacaatttagtaccaaagttccgaaatctcccatcagagaactgttagaattggaaccagagacagctaagttcagtaaacctgaaaaactagcggatggaagaagagttagagtcacagttgaagtatttggcaaagggacattcaaaggtataggacgaaactacaggatagctaaatgtaccgcagccaaatgtgctttaaaacaattgaagattggactattagctagaaagttaactgaacatcctagtcagtcattgttaaaagttctcagagtctgccatgacctgaaaaacaagcactagaacttcataattgtctgtattattttaaaaagcctattatttttatagtttttacttaattagaggagtttatatgacagtaattgtcatttaaaatattttgcttataacatgaaaaatttgatgttttattgaaaaataagttatgaacaaaatattttaaaaactcataattattacaaatgatcttgtgaatggcaagtttcaataactgataatttattttaaatctaatacttttttccgaaatatttga

SEQ ID NO: 254 - DNA, 6588 bp, Nezara viridula
ttttgaacacatgagttggcatgtgttaccgtgctttgtgtgagttcaaaagggttaaataagttaataggattcttccatttgttaatattctagttcagcacgttatatatatatatcagttgattttacagtgaatataaaggtagtaggtactcacattgtgtttcaaaaagtagtgattcaaaaaccagtgcaaatttggttgtctaaacacgagttactagtttttaatgttacaatgtcacagcattattattacacacagtcagtgccttttccttataatgctgaagggaattatatccaaccacctccaccattcttcaattgcttcactccgagtgccccaggatatgtaccttataatacttcatatcctccaccaccagtatttccacccgggagtgaattggtgagtaatcaatttcaaagtagtatagtgagtggtagccatgtaactactgcaacagatacaaacctcagcaaagatgaatgtgctaaattacaagatgagtttatttacaaatgtttaaatgggccaaggagtagctttgacaaaagaccacccagagaacgatcaaaacacagatcttacagcccagagccacggcgaagatctcatagtagttctcgtggtgctgtcagtaggaaacctagacatagaagagacagttcagattcatctgagagagatagaagttttcattcaagaactcgaaaaaaatcatttatagacaaatggcggttgaacaattgttctacgactaaagaaatgaagaacaaattagaagaaatcagtcatatgaatccagaagatattattaaaaaagaaaaattattttggacacgttcagctccagctgatttatattatgttaaaaaacaagatagttctacagtattggaagcaactgataaactcctgagtctttgtaatcaatttgaagaagaactggttaagaggggccaaagggctagggctgaaaagccaccataccaatgtcctccacgaaaaaagaagttacataagcataaatgctgtaatttaaatcatgattcaagttcagatacctcttcagaaaacgaatctgaagaagatgaaggactccttgaagaattagaaagaaaaaaagcacatcctgataggttacatccagaattgtggtataatgatccaggagaaatgaatgatggccctttgtgtagatgcagtgctaaagccaagcgatcgggaatcagacataatatatatgctggtgaattaagtttacaaaaatgtgatatcaatacgaataatgctgataaattatatcactacagaatcactatttctcctcccaccaattttttaattaaaacaccgactgtgattgaatatgatcaccatgaattcatatttgaagggtattcgatgttttctcataaacctttggaaaatttgcctgtatgcaaagttattaggtttaatattgaatatactattctctacgtggaagaaaacttaccacaaaattttactataagagaactagacttatttcacgagtttctatttaaagaaatattagaattagttgatcttgattttaaagcagcaggtgattctaatggttgtgcccagtttcattttatgccaagatttgttcgtgaacttcctgaaaatggaaaggaattactctctatgaacgtaattttaagttatttattgaatagttcaaaacttttgattccaaaggatgaactaaaagacattataagtttacctaattacaagtggcaaaaacttgttgatgaagttaaaggaatggtggttacgtatccagggaaaaaaccttgctctatcagggttgaccagcttgacaaggatcaaagtaatgtcagtgatgggaacccaaaatatcctgaaatagttcattttggaattcgtccgccacagttgagctatgcgggaaatccagaatatcaaaaagcgtggagagaatatgtgaaatttcgtcatcttctagctaatatgccaaaatcgtcttacgaagacaaaagaaaattagaggctaaagaaaataaacttcaagaaatgagaagtcaaagcaaaatgaaacgagatgttaccatagctgtttccagtgaaggattttacagaacaggtattatgtgcgatattgtccagcatgctatgcttctgcctgttttagtatcgcatttaagattccatcgctctttggatgttttagaaaataagataaattataaatttaaaaatagaagcttattacaacttgctctaactcatccatcttatagagaaaattttggaaccaatcctgatcatgctcgaaattcacttaccaattgtggcattcggcagccagagtatggagacagacgaattcattacatgaacaccagaaagagaggtataaatacacttatcaatataatgtccagatttggaaagaagcgggaaactgaatcaaatataactcacaatgaacgtttagaattcctaggagatgctgtagtggaatttgtttcatcaattcatttatttcaccttttccctaggcttgaagaaggaggtcttgccacttacagagcagctattgttcaaaatcaacatctagcagttctagcgaaaacattaggcttagacggatatatgctgtatgcccatggttcagatttatgccatgatcttgagttgaggcatgcaatggctaactgttttgaggctttgatgggtgcacttttccttgatggtggtatagaagcggctgacaaagtttttggtgaagtactatttgaagacaataaagttttgcagaatgtttggagaaattatcctccacatcctttgcaagaagaagaaccatctggtgatagaaaatggattgaatcctaccagatgctacaaaatcttacaaaatttgaagactctattggtgttcagtttaatcatattcgtcttttagctcgtgcttttactgataggagtatgggttacaataatttaactttagggtctaatcagaggttagaatttctcggagatacagttcttcagttgattgcatcagaatatttatataaatattttccagaacatcatgaagggcatctttcattattaagaagttctctagtaaacaacagaacacaggcggtagtatgtgatgatcttggtatggctgcttatgctgtatattctaatccaaaagctgaactgaagactaaggatagggctgatcttttagaagcttttcttggtgctctgtatgttgataagggcctactttattgtcagactttctgcaatgtttgtttctttcctagacttcatgatttcatcatgcatcaagattggaatgaccctaaatctaagttgcaacaatgctgtcttacattgagaacaatggaaggaggtgagccagaaataccagtgtataaagtcattcagtgcatgggtccaactaacactcgtttatatactgttgctgtttactttaaaggaaagcgtttagctgaagcttctggtcatagcattcagcaagctgaaatgaatgctgcaaaagtagctttagaacactcacaaagtttgtttcctcaactagatcatcaaaaaagagtaattgcaaaaagtatgaaacaagagccgctaaactctgtaacatcaaaaaagaaactaaacaaagattattatgaagaaaaaatttataagaaatatgattatggcaatccacataagaaatttaaaaaagaaaacataaaagcctcttcttccaaagaatcatcacccatttccagaagattttcttctagcaatgataaatcagattctgattcagacagtcgcagaaaaataaaaaaatacaagcataaaaaatgtaatgaaaattctttggatagaatgtcaacttctgatgagtattgttctgatcaagaaaataacaagaaaaaaattcgttattacagcagttcttctaccagttcttctgaagatgaaagcagtgttgacggaagtactaatagctctaacaaatcaatgcagagatatggtactaatgaagaactatcgaaaaattatttattttattcaaatgaacttaaaaatatgaaagatcaactagctggagaaggaaaaagcagtgtactaaatggcagcgatctgaaagaagtagattcgttatctgaagatggaagcagctcattttcagttgaatatgatcagaataataaacgtgtttccgaaactccttaattttattcaaaaccaatgtattgaagattagtgatatttgtaaattattagtgatactcaaaattaattatttattgtttttacttttatgtatgaaatatttattaatagttttattttattttagcattaaataataaattaaaatggctgtgtgtgtggccaaaagatacaaaatcagaaaatctcagtatcgaaaggctacagtatttattattattataattttttaatccataacatccattgtaagttataaatgaaataaagttatgtaattaaatgaatgttaaaacttacgcttttttaagcattatggtatcttttttaagatatgaggtatctattaagcaatatttttatcttattgttaagtctatttattattgtaaatttattaatttaagatttactatctattagaaataataaagtgatatgaataaaaaaaattataaacatgcacatgaaatgcttttaaacatttatacagttagacatctataaacttatagaacaacctggaaatatgacattgaagttctggtattactactttgtaatttaaaaacattgaccattgtcttctgattccagatgaaggtatgttacatctgtccatgaggtagtagaactaatttttgaagacaactaacataggaatcctcataaatctatttaatgataaatggcaaaactgttaatgagattatgtcagtataaatacatatgtaatgaatacacctaagcagaaagcttgattgatttcaatcatttttattgtaaataaatccatagtttaatttatacttctgctgaatccatgacatttagttggccattgatgttaaattctgaatttggttgtattattcagctgcttcttgcgtctcagaacaaaagctatcttatttgttatcttgaaattatacaaatttaaaattaaggaaaaagtctagtaaatataataaattagttatgatataataagaagatgcagtccttgtccatgcttaactacaatctgacatgacctgtattccaggagaattacagaacaatacaagttacattgtctggatatactaattatcatgtgctatttttaatatataattaagatctatagctgtaagggtggtactcaaatatactgtagaatgctggctggactataacagaaaacaagctctggtgagaggtaggatcctgataagcttggaatcaatttgtttaagtcggtcttggtttctgcagactaatacagagttattgatgctatatgacgatgttgatgtggtaacctacattgagctgctgggcatgtcgttagaatacttgttaccaagaagatgtcagaaaaaggaaataattggaaatggaggagaaacaaaacaaaattgtagaggttagatggtgtagtaaaaatgcccgacccatgattagaatttggaattggaaaacagtagcatagaaaagggatgattgatggtcattgcagcacctagtcctgtcttcagaagggataatctagcaccacagaaagaagtgagtaactaatgtaaaaacatttattttactattatgttaccaaaaactatattttgtgtattatcatgtgcttacaatacaattactttctggctcattcataaaaaggattgatgattgataataaagagttggcaactaagtttctgtatttgtatttattttataattctactaaggccaacaatagccccaatgtgggttgctatcttaattagtatatgtcagctaagatttctcttaaggcttgttaagatcagatccagggtttgaaatgaaattatagcttttatttttaatcattttcagtagtactggaatccttattttcaattttttttctgttatgtttgaagtatatttttcccttgcaactttcaagtaaagattttacagaattttttttttgtttgtttttaaacttttatttaaaattctgttggtttcgcaataaagtcaatctaaaaattgtctattattcatagctactcaagcaaaccacgcttaacaatcaagtaaattatttaagataaataacaactctaatctaagctcaattactgtttatttcttattcacagaaacttttcaacttcaacaaattaattttttttctgtaaagaattgatttgtacttgttaactttttaataacaatcagcacttgttctgaaaatacaagatatatatgacatgtcaggtatgagtaaggacagtactcagcagcatctcttccctgacttgtttcaattactgaggttgtttaaggaaggagatctc

SEQ ID NO: 255 - DNA, 4771 bp, Nezara viridula
ttttcccctttcctaaaagataagtattttattgatcttgactgatagttttaataaacttttataaattcttatccaagcttgattttccccttatataaaatttttcataccaacattgaacagacctttcgccattctttcctcttaaacttaccaagtgacattggctgtggaacaccctcattccaataatgttgaaaaacagctcaaactgtacatttatccatcgtgtataataaaagttgaagtaaaactgagtagaagaggattaagtgctgtaaactatttctgtaaagatttctgccacaatgagaaaagcccaagataattaattagtctgtaagactttggtttttaaatattgcctgccaaagacgtactgagagccaatgtttcgaaacaattctagttcaaatgagatttcttctaaaactactaatgcctttgtacaaaataaagacgaggaggacaaatctgagagcttgctaagaggtatggcgcagcctcacaagcccacaagtcctactcttcaagtgcctgagaaaagggacgtaatggtggtagatattggggtgagagaagaagatggccccgtcctgactgtgataaccaaccatccgtcccaagcgcccgccaagatttcctcatcagaaattggtgaatgtgaatctgacggttcttccaaaatgccactagcagagacacaaggaacgggtgctctttgcttagatagcattaagtctattagtgttaatgaatcatttagtgttaaggataaatttatttacccgagcaagagttcaattcagccgccaaacattccaaaaaccaacgatgataccgatcaagatgttaaaagctttaaaatctgtgattattatactcggtggggaattccacgaaacttcaaactgttaggaggaggagagagttctcttactacaggaactactggctgggggtcaccaccttctaatcaaggtggaagttctggttggaacagtgctagtactactagtgggagtaacagttcttcaggacaaggtcaagcagttactggacaaagtccagctcctgcctctgggggcagtactcaaaacaataccaataacagcaatagtaatagtaacaataataatggatctcgtagttcagtcagccagcaaggtggaggtagcacacaacagcaaccaggaggggggccacctagtcagtccacggctccacctgtagcagctgtgtctacaccaactgttacaactgctccagcctcttcatcaacaaatacgtccaatataaatactgcaacaacatcatcttctcaacaaaatggttcaactgctggcaaccaagtggtaggaagtggttctacctgggccacagctgtaggtaaaggacttcctccaaccagcacagctacaactcccacatcaagtggaagcacatctactaaacaacaaatggaacaacttaacacaatgagggaagctctctatagtcaagatggatggggtggtcaaaatgtcaaccaagacagtaattgggatataccgggttctccggaaccaggcacaaaagacagcagcaatgcagctcctgttcctctttggaaattacctattaataatggaactgacctttgggaagctaatctccgaaacggaggtgtccctcctcctgtcagccaacaaagccagaaaactccttgggttcatactccgagcactaacattggtggtacctggggtgaagatgatgaaggtgatgcttctaatgtatggactggggttcctcaagctcagacaggatgtggtcctcagtggcctgctcagccacctcccatttggcctgcaactaaaaaagaaggagattggggaggacctaactggaatgatcagcgtgacacaagagaccttcgtcacagtgaaatgagacaaatgatggatgctagagatcatatgagaccaacctctattgatcacagatcaatgggaggtaatgatgttataatgagaggtgacccacgaggaatcagtggtcggcttaatggagtatcaagtgaagccatgtggcctggcccaggacctcatcaccatataccccatcatcaagggaaattaccttctcaacctaaccaaccagttaatcaatggagcagttctggacctccaatgaaggacatgactggtcttggtggtaaatcaactggttgggaggagccttcacctccagcccaacgaaggaatatgcctaactatgatgatggaacatcactttgggggccacagcatcctaggccaactattcaaggccaaaataaggtttctcattggaaggaaatgcctgcccctggtattggacgaggtggcttacaatgtcctcccggtcgtgcaaaccctactatgaaacctgatcaacctttatggcctcatcatcctcgaaatgaacggggatgggaaggaggaatggatagtggtccttggggtgatgaaaaaccaactccttctgctgctccttggatggatcaaggcctagctccttcctcatggcaaggtggaccaaaacataagccagcatgggatggatctgatttagatcccacttcttgggttcactcgaaacagccttccaagtctgtttcaaaagaatttatatggacaagcaagcagtttcgcattttatctgaaatgggtttcaagaaagaggatatagaaagtgcattaagaagttctggcatgagccttgaagatgcattggatcagctgaacacaaacagaggactaagttctggaggcggtggtgaaagatgggctcgccatggtgatttagacccagaacatgccgctattatgaatgctgcatttccttcacctcaacaaaccatctgtcttgctccttatccgcagggtgggggtggtggcggaactgggagcggaccaggaggtgggcctaccttggctacaataactcctgcagtaatgcagaaactgcttgcacagcaacctccgcagcagcaaccttttgcccagcaatcttcgaggacacaacaaactcaacaaccatcagctcagcagcttagaatgttagttcagcagattcaaatggcagtgcaaactggttacctcagccctcagattttaaaccaaccacttgctccacaaactcttattttattgaatcaacttctacaacagataaagaatcttcagcagcttatgcaacaccatactgttatgcaagtaaatcctcttggtaaacctagttcaaatcacctgttacaattatctgtgcagatcacaaaaactaagcagcagataaccaatcttcagaatcagattgctgctcagcaagccgtgtatgttaagcatcagcaacatacgccgccgaccaccgaatttttcaagagttcattacatgaaccgatttctgctcttcaccctaatttttctgatctttctcttaaagatcctccgactagtggaactagtcagcagtcacgcttaaatcagtggaagttacctgcattagaaaaagactcagatattggttcaggtgaattttcaagagctcctggtacaactgctaagtcagctcaaggatcctcttcgcccaatactaatctattacttgggcaggctgatggtacctggtcttctgtaaatcgtgagtcaagttggcctgattcatctggtgatgatgcctctggtaaggattggccaaattccaatcaacctccatcgcaagcattctctgatcttgttcctgagtttgaaccagggaaaccttggaagggaaacccattgaaaagcattgaagatgacccaagccttacaccaggctctgttgtgaggtctcccctttctttgccttcaataaaggacacacacatattatcatcgaacactggagctggcaaagcctcacctaccactagttcctccttggatatcattccatctcttggcttatcatcctctacttggagctttaatccaccaccttcttcatctaacaccagtgtgaagctgaattctagtggagcaggtggaggtggtagtggatcaacatcaaataatggtggaggcaaaaatagtgcttcaacttgggaaactaattcatctgaattgtgggctccaaaaagagggcctcctccaggtttaccagccaaacctactggtggctccagtggtgggcaggcaacaaacgggtgcaaggttggcctggacccaatcaggcagcagctactcagccaggatcaacttggttgttattgcgcaatcttactcctcagattgatggttcgactttgaaaaccctttgtttacaacatggacctctatctaattttcatctgtatctaaaccatggtattgctcttgctaaatatgcttctcgtgaagaggctaacaaggcccagggtgctctgaacaattgtgttcttgggaacactacaatctttgccgagagccctagtgagactgatgtgctgtcattacttcagcatcttggtgggcaggggagtgctgctagtggcagttcagcttggcgtggtaaggaagcttggggcaattcccagctttggggagcgacaggagcgagctctaccgctgcttccctttgggcaggtgatagtgatcagcaccgcaacactccatcctccataaattcatatttgccaggtgaccttcttggtggtgagtccatttaggcaaatcctcttcattcttctctcaattcttcaccaaattcttctcgatctataaatacg

SEQ ID NO: 256 - DNA, 2331 bp, Nezara viridula
ccggatatataaacctcgccaggctcccggcccggcagtatactgactgaaaagcgttatggttacttttttgcttttattttttcgtggctttttattgtatctatttttttttttgtgttgtttgagtcaaagtgggtgttatgggctgtattggtattgatctttgtacattttcttggtgctttggctttttttcgcacggaaaagtggagatcatcgccaacgaccaaggtaacaggacgacgctgggctatgtcgcctttacggacactgagcgattcatcggagacgcggcaaaaaatgaggtagccatgaacccacagaacacagttttcgatgctaagagattgatcggcaggaaatacgacgatcccaaaattcaagaagatttaaaactgtggccttttaaggttgtcaacgatagttccaaacccaaaatccaggtagaatacaaaggcgaaacgaaacgtttcgctccggaagagataagttctatggtccttaccaagatgaaggagactgccgaatcatacctgggaagcaaagtgaaagacgcagttatcacagttccagcctacttcaacgactctcagaggcaggctaccaaggacgcaggggccatagccggtttgaacgtcctgaggattataaacgagcctacagctgccgccctcgcctatggattggacaagaatctgaagggtgagaggaatgttttgatcttcgaccttggaggtggcacttttgatgtctcagttctcacaatagacgagggctccctgttcgaagtcaagtccaccgctggggacactcatctgggaggagaagactttgacaataggctagtaaatcatttggcagaagagttcaagagaaagtacaggaaagatgtgaagagcagtccaagagcattgaggaggttgaggacggctgcggaaagggccaagagaactctctcttctagcactgaagccaacatcgaaatagatgccctgtacgaaggcatagacttttacaccagattgacgagggcgaggtttgaagagctctgcgctgatctcttcaggtcaacattacaacctgtagagaaggccctgcaagatgccaagctggacaaaggatccatccatgacgttgtactagtaggagggtcaacacgcatcccaaagatacagaacctcctccagaactttttcaatggtaaacctctcaatttatcaatcaacccggatgaggcagttgcttatggggctgccgtccaagcagctatcctcagcggagatcagagctctcagatccaagacgtgctcctggtcgatgtggcaccactctccctgggcatcgaaactgccggtggagtcatgacgaagataatagagagaaacagcaggatcccttgcaagcaggctcagacgttcaccacgtattccgacaatcaacccgcagtcaccattcaagtttttgaaggcgagagggccatgaccaaggacaacaatctcctgggtacattcgacctgacaggtatccctcccgcaccccgtggagttcccaagatcgaagtcacatttgacctggacgcgaatggtatcctcaatgtctcggccaaggagaacagcactggaaagtcaaagaacataaggatagagaacaacaaaggccgactctctaaagaggaaatagagaggatggtcaacgaggccgaaaggtacaaagcagaagatgacgttcagagggagaggatagctgccaggaaccaattggagagctatgtcttctctgtgaggcaggcggccgacgaggccggagataaactgagcgaagaggacaagagcaaagtaagggccaggtgtgaggaaaccatgaggtggctcgacaacaacagcctcgccgataaggaggagtacgagcataagctgcaagagcttcagaaggagtgtgtatcttatatgacaaagatgcacaatggtggcgcaggctcttcttgtggtcaacaggctgggaacaactttcatcgaggccctaccgttgaagaagtcgactaagaaaaatacctacatcaaattttaagttcctagtgtaaatagatgtacgaggctgttataagattgttcatattgtaaatattagttatattatttttcaagactgaatagttttgtagattattacggattttcagttaatttatttcaatcaatgtgatcaaaagtatatatttacttataaaactattaattaaaagaactgaaatttatgtaaaatgttttttattttgttctgttttaataattgattatttattttgttaataaatattttttttttaaa

SEQ ID NO: 257 - DNA, 2325 bp, Nezara viridula
ctcgttgcaatttcctacttaatattgttgattgatttactttaactttaataatggtagcagtcggaattgacttgggaactacatattcctgtgttggtgtttggcagcatgggaaagtagaaataattgctaatgatcaaggtaatagaactacaccaagttatgttgcattcactgatactgaaagattgattggagatgctgctaaaaatcaagtggccatgaatcctcaaaacactgtttttgatgctaagaggttaattggccgcaaatatgatgatcctaaaatacaaggtgatttaaaacattggccttttaaagtagtaaatgataaatctaaacctaaaattcaagtggaatataaaggtgaaattaagcgttttacacctgaagaaatcagctccatggttttaacaaaaatgaaagaaactgctgaggcatacctaggttctaaagtaaaaaatgctgtgataactgttcctgcttattttaatgattcacaaaggcaggcaactaaagatgctggagccatagcaggcttgaatgtcatgagaattataaatgaacctactgcagctgctctggcatatggacttgataaaaatcttaaaggcgaaagaaatgtattgatatttgaccttggtggaggtacatttgatgtttcattactggccatcgatgagggttcattgttcgaagtgaaagcaactgcaggtgatactcatttaggtggtgaagattttgatagtaggctcgttaatcatcttgctgaagaatttaaaaggaagtacaaaaaagatttgaaaaataatgctcggtctcttcgtagactgagaactgcagctgaacgtgctaaacgaaccctttcatcaagtacagaagcttcaatagaaattgatgctctttttgatggtgttgatttttatactaaaataagtcgagcacggttcgaagagctttgttccgatttattcaggtcgaccatcaatcctgtagagaaagctctacaagatgctaagcttgacaaagcttcaattcatgatgtggtattagttggtgggtcaactcgtattcctaaaatacagcatcttctgcaaaattttttcaatggaaaagcattaaacatgtctattaatcctgatgaagctgttgcttatggtgctgcagttcaagtggtgacagtagttccaaaatacaagatatattattagttgatgttgctcctctttctcttggaattgaaacggctggtggagtaatggctaagattgtagaaagaaatacccgtataccttgcacacaaactcaaatgttcactacatattctgataatcagccagctgtaactgttcaggtttttgaaggtgaaagggtattgaccaaagataacaatcttttaggaacatttgatttatcgggaattcctccagctcctagaggagttcctcaaattgaagtcacatttgatatagatgctaatggaatacttaatgtttctgctaaagacaagagcactggaaaatctagaaacataaaaattgaaaataataaaggtcgtctatcaaagtctgaaattgatcgaatggtacaggatgcagaaaagtacaaagcagaagatgatattcaacgagaaaggattgctgcccgaaacaaatttgaaaattatgtatatagtgtaaaacaggcgacagaagagtcaggaagaaaactaaatgattctgaaaagcagaaaatactcaagaaatgtcaagaaggtctaaaatggttagaaaataataccttagctgacaaagatgaatatcaagaaaaatatcttcaactacaaagggaatgtacaccttttatgtccaagctacatggaagggggtccaggaattatggagaagatgactctggtccaacaatagaagaagttgaataattttagtaatcaatataagcctgtaacggattgttagaacgtttagaaacttaataagaattacttgtaattgaattattgaaaaaataaataactttacttttaagttaatttaaaatttccattagttaataggaatgttgaataatatgagttaacactctagtattattctacttgtgatagatgaaagcacatagactgctaactgtgatttaaccaaataatttatttaatagtaaaagatattttaattatacatttttatttgagatatcaattttatttattaattaaagctttaattaaaattaaataataatattgtttttgtttatttatgtcgtgttcctctttcttggttgcacagacggatctaagggaggctttctggctgaagc

SEQ ID NO: 258 - DNA, 2276 bp, Nezara viridula
aaaaagtatcaattcaggaataaaattcatattcatggcaaaataggttcatatgagctatttaagtatgtatgattgtttaaagtaataaaaagattatttttcaaaaaagacaagaataaaattataacatttaaagagtatagcgaaggatctgctaactaatcaaagtttaaatcaagcataaaatgccagcagtaggaattgatttaggaacgacgtattcttgtgttggagtgtggcaacacggaaaagtagaaataatagcaaacgatcaaggtaacagaaccacccctagctatgtggcatttacggaaacagaaaggcttatcggggacgctgcgaaaaaccaagtagccatgaacccgcaaaatacggtatttgatgccaaaaggttgattggtcgtaagtttgaagaccctaaaattcaagaagatatacgacactggccgttcaaagttgtaaatgacaattccaaaccgaaaataagagtacaatacaaaggagagtcgaagaaattcgcaccagaagaagtaagctctatggttttgaccaaaatgaaagaaattgcagaagcgtatttgggtaacaaagttcgggatgcagttattacagttcctgcgtattttaatgattcacaaaggcaagctacaaaagatgcaggtgcaattgcaggtttgaatgttctcagaatcataaatgaaccgactgctgctgcactcgcatacggcttggacaaaaaccttaggggtgagaaaaatgttttgatattcgatttaggaggaggtacatttgatgtttcagtactgacgatagatgaaggttcactatttgaagtcaaatcaacagcaggagacacccatttaggtggagaagactttgataacagattagtcaatcatctcacggaagaatttaagagaaaatataaaaaagatatgaagtccaatgcaagagctttaaggaggcttcgcacagcagcagaacgtgcaaagcgaacactttcatcaagtacagaagctagcatagaaatagatgctttgttcgatggtatagatttctacaccaaagtgaccagagccagatttgaagagcttaatgcagacctattcagatctacactacaaccagtcgaaaaagcattgaacgatgctaagctggacaaaagttcgatcaacgatgttgttctggttggtggatctaccagaataccaaaaattcaaagtctattacaaaactttttcaatggtaaatcacttaatatgtcaatcaatcccgatgaagcagtggcatacggagcagcagttcaagcggcaattttaagtggggatgaaagttcacagatccaagatgttcttttagtcgatgtagcacctctttcattaggtattgaaactgctggaggtgtgatgactaaaatagttgaaagaaacaacagaataccctgtaagcaaacacaaacattcactacatattcagacaatcagccggcagtgacagtacaagtctttgagggtgagagagctatgacaaaagacaataatcttttaggaactttcgatttgactggtatacctccagcaccgagaggagttcctcaaatcgaggtaacattcgacatggatgctaatggtatacttaatgttacagcaaaagagataagtactggcaagtcgaagaacatagttataagaaacgataaaggcaggctttcaaaagaagaaatagataaaatggtaagtgatgctgaaaagtataaggctgaagatgacaggcaaagggaaaaagtagcggcaaggaatcagctggaagggtatctttatggagtcaaacaggccgttgacgaatgtggtaataaacttaatgattcagaaaagaaaaaattacaaaccatttgcgataatggtattaagtggctcgatcagaattcatttgctgaaaaagatgaatatgaatataaatttaaagaggttcaaaaagaatgtgcaccattgatgaccaaactacacggtggcggtccaggatttgctggatgtgggcagcagagcggtgccaactatcaatctggtggtccaacggtagaagaagtagactaaaatatcaattgtcgtttttgaaatacaaaaaaaaaaataaataaatgatctaaattaaaaaaaaagatttattttcattcattattctgagtaatagctaagcctgccttagtccctgttaaagaatattaccaatacctacagaatactgatgcatgagcaccatttataagataattg

SEQ ID NO: 259 - DNA, 4358 bp, Nezara viridula
ccctagtagtggcagaaatcaattttgtctgtgccgtaggtgcatcgccattttctcgagataagtcaattttgtctgttcggttgttgcatcgccgttttctctgtatatgttgttgaggcttgctggcctatgggactttagctgttgctgtaagtttttttggggatttgtgtttgtcggggcacactccttcagttcgaggtggacgtcctaggatgagaagtaacactcataataccagaacaatacaaccttcagagcccatccctcttgaagaagctgcaaaaagggagctgcaggccatgcccaccaaaacgccagtgtcaatgctgcaagagctgctttccagaagagggacgactccgaaatatgaactagttcaggtggagggagcaattcatgaacccacttttaggtatacagtctccgtaggagaaactataggatcaagtagatttgctgccatgggcactggtagatctaagaaagaagcaaagcatgccgcagcgaaagcaatcttagacaagatcacaggaaatacagaacctctagatatctgtagcccagcctcgactacggatagcataggctccaacatcggggcagtcgaggagcgaatgatgggcaaccctattggtcttctacaagaattatgcatgaccaggcgatggcctccacctgcctacgaaaccgaaaatgaagagggccttcctcatgaaaggcagttcaccatttcctgccttgtattccgacacaaagaaataggtactggcaaatcgaaaaaaattgccaagaggttagcagcacataaaatgtggatgagactgaaagacttaccctgcgaaagcaacaccattcattacggcttggatgatgaagatgagataatttcattaaaggattcggattttaatgcagtccagttcctacaagagatagctgctgagcaacagtttgaagtgacatttgttgatgttgaagaaaaatcagtcacaggaaaatgccagagcttggtacaattgtcgacactacctgtagcagtttgttatggtacggggatgtcctcttcagaagcacaaacatgtgcggcctacaatgcattacagtatctcaaactgatgaccaagaaatagaatcgggtgactgaagaccagctcaggactgcaactgtgtacctcacttccttctcttgctttcttatttcctacggcaaggtagcctccgcaccaggcatcagatggtgtcgcagctcctgtttctgtttatttatttgtattattaacttttaattaattttaattatgtaccatttgttggcgttattaacccaaaaatggataacatttttacaattagagtcgtatgaggtatgtttcatttgacgatcaatatgagttgtggcccattgttagttgtgaccctattttacgatatattttttatcaaatgttttcagattactttttaattgtgttatacaacttgtttttttcaatctgattggacgagtctctggaaccaaaaaaaaaaataatttaaatcttttttgttactaattgtttaacttagacaaatgagaagtgatatttctttatgttgtttgttatttaactcctttctttatcgtttttaaacattttattttatttttaaaagttttgttctgttagatataaaattgattcctcatttagataaatttattgttgttcagaggcttaatacacagatattaagaatgtatgatagcaactgcaatgtgccaaaggtaaatgaaattaagttccaattattttgaatttaaatcaattcaatagaatattcttgttttgtttttttaaactatagttgagcttattttattttttgtggaccgttgctttataaatttcacacttatttagttaaaattatttgtttgataatattaacaataaagtgttcaatttgattgtttttttcatttctccctctggttgctttaatgatatcaagaattctttttccaaaattggacaaagtgaataaattgaactaatgcgaattgcgaataagtcatagctttatattaaacacttatttccaaagtgttgttcctttagaataacacttaagaaatatgtgagatgaccctctccagatggtagaatggtaaatcagattgatcatgttttaatcagtaggtgacattagtctagtttgatgagctgtagatcctatcgagaggctaatatggattgcgaccattactttgtggtccaaaatcagagctacaacatctattgttggaaaaatcaggggaaagaagacagaaaagatagtgatgtttaagctgaaagattcagaagtaagtgtatcagattatcggaagctagataagatggttttgaatacaggaatgccggataattctatacagaaactttaggatactcttttgaaattacttcaaggggtgaccaaaacataggtctggaagaaagaataaccatgtctctctggtttgatgtagattgtgcaacaaccacagaagtaaaaaaacaacagaagcgtattactaggtgggcttcagagcagtacaagggaaagagaagataaaaaactgcactataagaagacggattggaaatgtaagcagcttaagaaaatgaaacaactcagaattcagaaccaatttggaatgttttacaaaaagattaatggaactaaagcatcatttaaagcactgatttagtgtgaagatagcaattaggagtgaagatggatctctgatcacaaaacaggatgatatactgacccggtggtcttgttatttcgatacactcttaaacaatgatgtgggaaatccagattattttgtgattccaagtagagaaaatgatgaagacccccttctccacagacaaatgatgactattgaggctctaaatggcatgaacagcaataaagctccaagggaggatgggatctcagctgaacttctgaagcaggttggtgaagagtttcaaaaagctctgtataatataattcttaccatctagattgaaaaaagaatgcgaatcagtggaaggggcttatagctactgcataagacagatgaaattctggattgttccaactacaggaggattgtggttcttcagtatgcatattaagttcttttcatgattatatatatgaaaatgcttccatttgctgagagagattggttggtattatgctggtttcagaaggggtagaccaaatatacagcatcatattgatcctagaaaaattacatgagtaacggaatattacccaccatctgtttgttgattttcaaaatgaatatgacagtataaaaagccctaagttatacacagctctctgcgaaatgggaataccattgaagaagaactcaggttgaggcgggctgtgctgttaggatataatcaggtgttctctaatttgtttctgcaagaggtgtcagagaggatgatggtgttgcctgtctgctatttgatttagcataagaaaagatctacttaactcaggacaacagacactattcttaacaagtctgttcaagttcttgatttgcagatgatctgaatctcattggaggatgcttccagtcactcaaaagtgggttcttaagtttgttgaagctgcaaaagagatgggaatgattgttaatcaagaaaaaactaatatctggagcagacgcagtaggacaagaacgtgtagagatgggttcatttaccttccattatgtatcgtggatcaataataacatccagaaacatatcatgcaaccagtgctaagtattgtaaacctcttaaatgtgtaaagtgaagacaattatttacaaaatgtgtgttaaatatggctgttagcaatcgattgcagcctagcaatcgattgcagcctaaggtcctgtaaagtgttgctaacttcataaatgcacagagtaggttattgtaaggttttgatgtgtttgattctttgttctttatttgtgtataatatccacagaaatggactgtaaagacagctaagatgccacctaactattcatcaagttctttgccttctgaatcatccgcttcttcattcatgctttctagtatttttaacccaaataatccagcaacttagtattttcacttcactcactctggcatttaaaaaaaaaatcaaaagctagtagaccaattaagaactcaaaaactttgtttacagtacaggcataaccttactataacactttagcacagacatgttatttactattcattcaaaatttgtgctgactgcttagcatgatagcacattaagcattgacaacaagattaagcattgacaacaagtgcat

SEQ ID NO: 260 - DNA, 678 bp, Nezara viridula
ggggaatagagtgttccacgatttccgttccggactttgccgtaatctagtctgttccgacttattcacacgtggtattgatgttcaagcagtaaatgttgttataaactttgattttcctaaaatggccgaaacataccttcatagaattggtcggtctggaagattcggacaccttggtatcgctattaatcttatcacgtacgaggatcggttcgcactccatcgcatcgaacaggagcttggaacagagatcaaaccgataccgaaggtgattgatccttcattatatgttgctaaattggaagatggtattgaagatggcaacttcaagtaatttatcagcagcatcaactcatgtttttgtaaatagtcttttctttttttttcggaagatcatcaaagataatattaaaaagcagcgatcattatttttttaagattataaaaccttcgtaatataagttttaatgatgtatagttacaaagctctttttcttaaacaaaaatgaaaagggggggcggaacaaagaatgatcttttcgttcagacgtttttatacaatttttatgtaaatatttatacattattgtattgaggtcgttattgatattcacacagactgtataatatattatataaagcgttgtaaatagttcgtaataacatttttaaggg

SEQ ID NO: 261 - DNA, 3428 bp, Nezara viridula
cttttttaagacatgcgtctgcaggttgaaaattggttgctttgacaaaacttcaacatacgtaaattgtttataaaatggtggttatacatagacttgtgcttttcgtgttaagaaatgcttgaattgaaacaagatactacaaaatgcatcctcacgcgaagatggaatacttcaaacccagtccatgccttaaaattgataacataactgttatcaaacactgacaattggaaaaatgaattctctacctcattttattattatgaaagcgtaatagtgctttgatcttatgcaatggacgggatagcaggaagttccgcagatttcagcagcaccttggctaaagtttggaatcaatgtaaaagatgtgatgcattggatcggatgcttcaacatcactttgaatccagtgggaatccttacgaaagtgtcctaattttaattagacagtcccctgactatagcctttcacgcccaaatggtctttcatttactattattaagcaattcgccagttggattagttatagaagagaaaattataaacactgccttactgaagaagtgaaacgtgaagcttttcaagtagcttccagacaaagaaataaaactataagcaagagtattattgatgtttatcttcttaaagactacaagcacttgtttgtgaaatctctacatgataatcttcagctccatatgtacaaagaagtatgtgagtggtccatgatgctggatttagaatctgagtttggtatttttgattttattgtgccacttattttccaagataagcttacagttgttgacgatttccttaagaagaaccgtactcatcatttagaattgattaaattcttagataatattttgtcccagagatgtatttcgaacttcattgatcagctaatagcagacttgaagatagaaagtgtcaagcattcctcgttgcctaaactctctcaaacgaagcccttgtgcaagctgttgaagagatttgcttccatacacaatatccctcctgagagtacgcccaatctcactctcaggaacggcattggaactgttaattttctcatccggaaaagatattatgaccgcagtttaagcaaagaggcattccgtgaactggtgaaagatgcttgtggttcgaggagagaggttatgatccacttggtgaacaggcttgacgaagaacaagatccgactgaagccttgatttgtgcacgccttttctctgttcctccttctgatatgcctccaagtgtcagagctcttgatgaaaatggctggagggaagatgacttagcgacttcagaggaactagtggaagaagggctagaccggagtgatgaatatcataaatttcctctacaactttcttcaatatttattattgacacagaagcagccttttcatctctcattgattcctacattgatggagcttgtactataggtattgatttggaatggaagccgacgatggttgcccctgccggggaactggctctgcttcaattggcgaaagaagacaaagtatttctcatcgacgttctctcactaagtactataggtattgatttggaatggaagccgacgatggttgcccctgccggggaactggctctgcttcaattggcgaaagaagacaaagtatttctcatcgacgttctctcactagccaattctcatcacctctggggccaattcgctcatgtttttctcaataaccatgatattctcaaaataggttttgccatgggtgctgattcagccatgttggctcaatgttttcctattgatttcgcatttcgaatgtctgggcttggctttttggacctctcatccctctggaacaaacttgtaaaggattacaattttgagtttccatacgaagctaacgaaagctgttcgagttgtagcctaagccagctggtggctctctgtataggaaaaccactcaacaagagggaacaattttccaactgggagactcgtccattaaggctgactcaaaaagtgtatgctgcactcgacgcttactgtctgattgaagtttatcaagttataaaaaggctgtgctcagaaagaaacatacctcatgatgatattaatcaagatatgaaaactaagacagagaaaggaaaagcaaaaaagcataaaacaagcaaaaaaagtaaagaagcgattagacatagatcgatagcgacagaagccaagaagataaagttggtatgtgagccgagcctggctagcatggccaccatattaaggaggcatgggatagacactgctctcgcagagctccaggacatagccgatgttgctgaattggaaaacagaatagcgctttcttcttcttggccttttaaaacaatttccgagcaattaccaaaggataagtgctacttggtgcgttcgtgtgcctctacagaccaatacagggaagtcatcaggcagttgtacataattgttaaaccggaggacattttcactcggtgtcaggcttgcaatagtgaccatgtaacgatgataaacaagaaaactgttgaggattggtttcgtcagaaaggtacgtcgaagactacgaactgtgtaccagcgggttactctgacaatgagtttacagactcagaagaggatgattattacagtcttagtccgagggagtgtcccgattcggtgaagaatggttctcattgttatccaactactacaacaggagttatagttaggttggacctggtcattgaagagcaagttaagtcggccaatttgatctgcttatgtgagaaatgcggacgggtgttttggcagacagagaccaaataacagccttcttgcaattgctgatctttgagagaataaagcgtaaccaccaatacggtcttataacatttcttcccgttcccatattttttgtgattaaccccatctgtgttccttttgatatcgtcgttcagattataggcgaagagagaaatgaaaaaaagtatatatatatacatatattaaattataagcaaagttatataactttttaagacaataacattatttaaaatatcaattgtattttaatagttttaaaaattttatttgctaaaatttatattttttattatgctgtttattctttgttttgtataatgtttttagtgttataagtgttgatgattttttgtttctcttatttcaaattgtacaaattaaacagtatatctatctagttctgttgatgtacttacttgaatatattttaatacttcacagaccattactgtattagttaagaaattttatgttgtactgctgtcctaaaccaattctgtgaatgtgtaataatgactcaccataactgacaaagtacagaaatataatttctaaattgacctatgtgtttctttaaatttttaccattt

SEQ ID NO: 262 - DNA, 2284 bp, Nezara viridula
ggaaaggtgattagggggtgttaacacgttaatagaatatctatttgattaaacttgtgtattgtttatattgttattagttactttgttgtatgtgaaaagtgcaactagttaatgtttaaagcattaataggatacatatatatttgaccaaacttgtatagtgtttatttgatcaaacttttgcagtgaagccctttacagtttagtgccaggtgtgaggtgcaatttggcttcttaataaaaattaattttcccgaggatatcaccagtacagagttgtctgttgtgtatattctttctgaattatggatgaactgcagggagaagtggatgaattgaagcgacagcttgagtttgagaggcataaggctgaagtggctagattaaggcaacaaaatgaagatctaagagtttaccaagttcttgatgagtgtgaagggtcagatgttgatgataacgtagaacatcattcagaagtagaatttgacataagcgacaatgaaattgaagctatgctggaagaaggttttgaaaaaggagtaaaaacaaaggacgaatcaaatggcaacagccaggatgatagcggtataagatatactgaaaataaaacatcaatattagaagaactaggatataatcattttgaaatgctaccagaaggttggatcaaaatcattcataaaagtgggatgccaatttatttgcataaagcgactagagtctgtacttttagccgtccttattatttagggcaaggaagtgttagaaaacataatgtgcccttgagtgctatcccttgtttgcagtatcgccgtgctcttgatgaggaggaaactagaaaaaaagaagaaggagatgctttaaatgtaaaaagtgatggtccacaatatttgcatactgccaaaattgaaacaacagaagagaacaaattgtcgcaaagccttggtgcttttacattacagcagtattgtaaaaaactatttcgtttcaaaaaagaacagagattacattttgtttcatgggctgataggcgtaggtatctcaaagcgaagaaaatagaaaaagaacaacacagaccatcgtttcctgatggaaccaaacttatcaaatttcctattcaaaatccagatgatgatcctaaagcaaagcctaggggagaatggataatgaatcccaacggaaaaagctacatttgcattttgcatgaatatgttcaacatgcacttaaaaaacaaccaacttatgaattcaaagctttagaaaatccttcaactccttactcagctacagtaattatcaatgatatgaagtacggttatggcacaggaacaagtaaaaaacaagcgaaacttgctgctgcgaaagcttcattggaaatattaatcccagaaatgagagaaaaaataagaagtgataataaaaatgggaaaaggagtggaataactaatttcccagatgaagatgaaactagtttatcaatatttgatgagatacggatagaagacccgagagtagctgagttctgtgcaaaaaccactgagccttctccttacgccattttactactttgtttacaaagaaattttggtctcaaagaaatgccaattgagtataacgtatttattatgactgttggaaaacacactgcacggattatttgcaaaaataaaagagaaggaaaacagagggcttctcaagctattttgcaggaccttcacccacacataactagttggggtgctcttttaaggctatatggcaaccgttctgtgagaaatgttaaagaaaagaaacaagaagaacaagaaattacaatgctacagagtaaagcttctctcaattctcccaattactctattattaacaaattgaggagtgaaatgaataagctttatgagcagcaaatgatggtaaaacccataggtttgtttatacctcctgcaggaacttcattgcctagttcagggactgaactgaataaagtagatttctaagtttttgttaaattatattattataatataattacctttctgtccaaagaagtagttattatattaattacagaacattgaatgttgtcagttaaagcatattaactgaagggactggtaaaaagtaagtgaatgacagtttgaatatttagttaaacagttaatactaatcttaatgaatgcgaaaataacctatttccccttctgaaagagaaatattttatttaaaatattgatgtcttactacatagcgttgcttttgcagcatactgattaatcgcttttgg

SEQ ID NO: 263 - DNA, 2387 bp, Nezara viridula
gtggaaaggtgattagagggtgttaacacgttaatagaatatctatttgattaaacttgtgtattgtttatattgttattagttactttgttgtatgtgaaaagtgcaactagttaatgtttaaagcattaataggatacatatatatttgaccaaacttgtatagtgtttatttgatcaaacttttgcagtgaagccctttacagtttagtgccaggtgtgaggtgcaatttggcttcttaataaaaattaattttcccgaggatatcaccagtacagagttgtctgttgtgtatattctttctgaattatggatgaactgcagggagaagtggatgaattgaagcgacagcttgagtttgagaggcataaggctgaagtggctagattaaggcaacaaaatgaagatctaagagtttaccaagttcttgatgagtgtgaagggtcagatgttgatgataacgtagaacatcattcagaagtagaatttgacataagcgacaatgaaattgaagctatgctggaagaaggttttgaaaaaggagtaaaaacaaaggacgaatcaaatggcaacagccaggatgatagcggtataaggtatactgaaaataaaacatcaatattagaagaactaggatataatcattttgaaatgctaccagaaggttggatcaaaatcattcataaaagtgggatgccaatttatttgcataaagcgactagagtctgtacttttagccgtccttattatttagggcaaggaagtgttagaaaacataatgtgcccttgagtgctatcccttgtttgcagtatcgccgtgctcttgatgaggaggaaactagaaaaaaagaagaaggagatgctttaaatgtaaaaagtgatggtccacaatatttgcatactgccaaaattgaaacaacagaagagaacaaattgtcgcaaagccttggtgcttttacattacagcagtattgtaaaaaactatttcgtttcaaaaaagaacagagattacattttgtttcatgggctgataggcgtaggtatctcaaagccaagaaaatagaaaaagaacaacacagaccatcgtttcctgatggaaccaaacttatcaaatttcctattcaaaatccagatgatgatcctaaagcaaagcctaggggagaatggataatgaatcccaacggaaaaagctacatttgcattttgcatgaatatgttcaacatgcacttaaaaaacaaccaacttatgaattcaaagctttagaaaatccttcaactccttactcagctacagtaattatcaatgatatgaagtacggttatggcacaggaacaagtaaaaaacaagcgaaacttgctgctgcgaaagcttcattggaaatattaatcccagaaatgagagaaaaaataagaagtgataataaaaatgggaaaaggagtggaataaaggcttcattagaaattttaatcccagaaatgagagaaaaaattagaagcgataataaaaacgggaaaaggagtggaataactaatttccctgatgaagaagaaactagtttatcaatatttgatgagataaggatagaagatccgagagttgctgagttctgtgcaaaaacaactgagccttctccttattctattttactaacttgtttacaaagaaattttggtctgaaagaaatgccgattgattataaagttaaccctcttcatcgacagtctaatgaatttattatgactgttggaaaacatactgcacggattatttgcaaaaataaaaaagaaggaaaacaaagggcttctcaagctattttacaggaccttcaccctcacataactagttggggtgcccttttaaggctatatggcaaccgttctgtgagaaatgttaaagaaaagaaacaagaagaacaagaaattacaatgctacagagtaaagcttctctcaattctcccaattactctattattaacaaattgaggagtgaaatgaataagctttatgagcagcaaatgatggtaaaacccataggtttgtttatacctcctgcaggaacttcattgcctagttcagggactgaactgaataaagtagatttctaagtttttgttaaattatattattataatataattacctttctgtccaaagaagtagttattatattaattacagaacattgaatgttgtcagttaaagcatattaactgaagggactggtaaaaagtaagtgaatgacagtttgaatatttagattaacagttaatactaatcttaatgaatgcgaaaatatcctatttccccttctgaaagagaaatattttatttaaaatattgatgtcttactacatagcgttgcttttgcagcatactgattaatcg

SEQ ID NO: 264 - DNA, 2194 bp, Nezara viridula
cggttggtgtggaaaggtgattagagggtgttaacacgttaatagaatatctatttgattaaacttgtgtattgtttatattgttattagttactttgttgtatgtgaaaagtgcaactagttaatgtttaaagcattaataggatacatatatatttgaccaaacttgtatagtgtttatttgatcaaacttttgcagtgaagccctttacagtttagtgccaggtgtgaggtgcaatttggcttcttaataaaaattaattttcccgaggatatcaccagtacagagttgtctgttgtgtatattctttctgaattatggatgaactgcagggagaagtggatgaattgaagcgacagcttgagtttgagaggcataaggctgaagtggctagattaaggcaacaaaatgaagatctaagagtttaccaagttcttgatgagtgtgaagggtcagatgttgatgataacgtagaacatcattcagaagtagaatttgacataagcgacaatgaaattgaagctatgctggaagaaggttttgaaaaaggagtaaaaacaaaggacgaatcaaatggcaacagccaggatgatagcggtataaggtatactgaaaataaaacatcaatattagaagaactaggatataatcattttgaaatgctaccagaaggttggatcaaaatcattcataaaagtgggatgccaatttatttgcataaagcgactagagtctgtacttttagccgtccttattatttagggcaaggaagtgttagaaaacataatgtgcccttgagtgctatcccttgtttgcagtatcgccgtgctcttgatgaggaggaaactagaaaaaaagaagaaggagatgctttaaatgtaaaaagtgatggtccacaatatttgcatactgccaaaattgaaacaacagaagagaacaaattgtcgcaaagccttggtgcttttacattacagcagtattgtaaaaaactatttcgtttcaaaaaagaacagagattacattttgtttcatgggctgataggcgtaggtatctcaaagccaagaaaatagaaaaagaacaacacagaccatcgtttcctgatggaaccaaacttatcaaatttcctattcaaaatccagatgatgatcctaaagcaaagcctaggggagaatggataatgaatcccaacggaaaaagctacatttgcattttgcatgaatatgttcaacatgcacttaaaaaacaaccaacttatgaattcaaagctttagaaaatccttcaactccttactcagctacagtaattatcaatgatatgaagtacggttatggcacaggaacaagtaaaaaacaagcgaaacttgctgctgcaaaggcttcattagaaattttaatcccagaaatgagagaaaaaattagaagcgataataaaaacgggaaaaggagtggaataactaatttccctgatgaagaagaaactagtttatcaatatttgatgagataaggatagaagatccgagagttgctgagttctgtgcaaaaacaactgagccttctccttattctattttactaacttgtttacaaagaaattttggtctgaaagaaatgccgattgattataaagttaaccctcttcatcgacagtctaatgaatttattatgactgttggaaaacatactgcacggattatttgcaaaaataaaaaagaaggaaaacaaagggcttctcaagctattttacaggaccttcaccctcacataactagttggggtgcccttttaaggctatatggcaaccgttctgtgagaaatgttaaagaaaagaaacaagaagaacaagaaattacaatgctacagagtaaagcttctctcaattctcccaattactctattattaacaaattgaggagtgaaatgaataagctttatgagcagcaaatgatggtaaaacccataggtttgtttatacctcctgcaggaacttaaattatattattataatataattacctttctgtccaaagaagtagttattatattaattacagaacattgaatgttgtcagttaaagcatattaactgaagggactggtaaaaagtaagtgagaaagagaaatattttatttaaaatattgatgtcttactacatagcgttgcttttgcagcatactgattaatcgcttttgg

SEQ ID NO: 265 - DNA, 5866 bp, Nezara viridula
cgagagttcgttgagattggtccagtcgaattagaaaggttaggttgcacacacattcaggatgacttaagtttgtttcattttttatctcgtaagcgtcggtccataggatccacggacactggctttgacattctttaagtttatttggttgtctcatccctcacccaatataaaaaaaacaattgcatcaaccagttccaatgcgcctacagcttcattgtttttaattagaaaccattatttcaaacatctttttgaattcatgccgtacttataattgttaaacttcgttttcaatcactacatggaaaaagaagttcctaattattgtttttgttatgaataaaacgtgatgtgaaggcatggctctcacatgcttttgagactactgtcaagaactgtaatcaatgaaagaacgaagacatctgttgtttcatcttctgtactagtcaatttatttaattttgaagtttacacacaatattagaaatggataatgaaatcagttctgtcgctacccagttggcagctgccgtagaattaacaatgaatcctcaggcatcacaggttgaaagattagaagcctacaatgcctgtgaagtgttcaaagagaagagtcctttgtgtgttcagtgtggtttgtatttagcacaaagagctgattattcccattttgttcgacattttggattacaactgatggaacactgtatcaagtaccgttggtataatatgagtcaggctgaaaaactattcataaaggagaatgccatgaaattagttgagcgaggtatggatacaacattagaagataaggcccacatgagagatgcattgtctcgtgttgttgttgaaatgattaagagagaatggccacaacaatggaatacattgttggctgaattgaatcaatgtgcttctcaagggaatatacaaaccgaaatggttttattggtattactgagacttgttgaagatgtagctgtattacagacattagagtcaaaccaacgtaggaaagatttgtaccaggcattaacaactaatatgtctgatttatttatgttttttcgtggactcattggaaatcattatgaacaatatcgctcaaatcttgaacttggaaatgtagctatggcaaactcacatgccagggttgtacaggttgtattacttactttaagcggtttcgttgagtgggtttccatgagccatattatggctgaggatggcaaattactccagattttttgtgttttattaaatgatgaaaactttcaagacgggtctgctgaatgtttgcttcagattgtattgagaaaaggtaaacttgatgaaagaagacctttgttgatattatttagtgaagatgcaatgagatgtatttttcaatcagctgagaacaagaattatcagtttttaaaaaaacttactcgtgtgttgacaggactgggaacacaactgtgttcactttggagtaaagatggtcagtcgtgtcctcctaattttcaaatttatttagaagctattgtcacttttactcgccatccttctctaagtcttgtctgctatgccaattccctttggcttgctttgatgaagcatgatcaaatatgtcgagatgaagtgtttctcagttttgttccaaagtgggttgaagcagctgggcctaaaattatgaaggtacctttcccttcatcgaagtcgaacctagaacctaatactcctgaagcatatgctgtacaagattttgatgcagaagatgaatataatgctttttttcataagcatcgagtagaactccttgatacatttaaacaggctactttagttgcaccattagttacatattcctatgttgaaaggtggttagaagtgcagattcaaaaaacagtgacacaaaacaatttagagccttgcactttaacttctgttgcttacctagaatgggaagcgctttcactggctctggatgctgtcttgggaaaactggtgatggcaaaggaaaggcctgatgtcaacaatggattgaagcttttggtcctgtgtttgcaattagaacctactgatcctctcatcctctcggccatgctgtcgtgtatatctgcactctttgttttcctcagtatggctcctccagaaacaactgctgtgtatttaccaaaagttttggacaagatttttgcaacacttgttttcactatacctggcgaacctaaaaaccaaaggtctcgaggcgttaagaatctgcgccgccatgcagcttctctaatggttaaaatagctcagaaatatccgcttctgttgcttcctgttttctcaagaatacatggtattgttgtcagtctgcaggctaagcctcacacattgtctacaatggaggctttgtgcttacaggaagctttacttttaataagtaatcacttatgcgattatgatcgagagtgcaggttcatcggtgaagtgatggctccagtcattggtccttggaataacatggcttcggctgcatttatgtccacaccagcattcatgtcttacgtaggattagataagcctcccgtggagcctagttctgatgatattaatggtcaaaacagatcacaaattatgtggtgcttagacgtgattcttgctgttgtaaagagagtcatgtggcccagcgatcctgaacttgctgcgagaggaggatttcttgtttgcacaacagaagctgggaatcctatttacaggaatcctgctacaccacacgttcttcctctactccctgggttgtttagtcttgcatttgttataaatggtctatcatcaacagctgctcttaccaacctgtctgagggctacagaggagcctatatgatgctagaactagaaaggcagaacttactaggaataggcagcacaagtgaggtaatgaacagtgagtcgaaaggggaaacaactccgctccaaagaatgcaaaatttcatatcttatgttcatgaggattgttgtcatgccttagcccacgcctttcatgccctcagtcacgatatgtatcatgttcctaacttggcacactccctcatcgctacggtcttctccaatctcgagtttgtaccagaccataggatgaggccgtttgttcgagtgtttttgaaatcttttgttacaagttgtccaccatcttgttatgatatcgttttaacacctgtgctggctcactttactccatacatgttcgccagactaaatgctagatggcaacatattctgactccaactccagtttccatgtaaacttcatagactaataaagataaaagaaatggcttcagctagcatgtccatcaaaatgaagaggcagttgaataagagctggataatactctcctctctaaaacacctctggtgttcgccagactaaatgctagatggcaacatttatctgaattgagtgaaaatggtaatactgacgaccatgaagagagtactgacactcaggagatgctggaagacatgctgaatagaaccctgacgagagagtacttggatgtgcttaaggtggtgttgtatgggggtgcagagtctggtaatggatctggcagcatggaggaagaaagccaagatgtaaagccccagtccgacgtcattagtgaactgggaatgagagtgctcgcttttgatcctacttcccagcctatcgttctctgtttattgagagctctatactggggagacagtacagccagtcttaagtgcacttcactcctcggtggggtcatgcttcatcttgtgtcagctggcaagatgactgcagaactggcctgtcatgctctcacatctatcttgttcggccttcagtgtcacggtcagcacgatgctaatcagggttctcttctcgttctgggaacacttatgtatggcatattgcggccaatagctcctgcaatcctacaagttatgaagcaaataccagatgtcaatatgattgatctgcagaaacttgacgacaggatgttgaaggaggttcagaaaggaacaaaagtagacaaagctaaaaaagaaatgttcaaaaaagttacaagtcccttaataggaagaaatgttggacagctgttcaggaaaaaagttgctattagagatctgcccaaaatagatagtataaagccgaaactcaattcagattttctcttcaacaatgacgagaacggtttagtgaagctattcaaaacatagcgccaaatactttctgttctactatgtatagttctagtctcctgtgttgtgatgctgttggttttctcctcctccttcatatcctattgtttaattttaattgcccaatttgatgtgatcaaaattaacttattctttagtttataagattatttttttacagaatgaatttttacattccatcatgaatgtaataaaaaatcaacaacgattaattgtctcatagttctaaaaagaaataagacttataataaatttttaatttttgtagacttgtaattattaattattgctatttaattaaattaaaaacgcttttggtattactccagaatgccgagtccttagttataatttagctaacatggttaattcataattcaggatttctggatgcttttaatctaccacatttcttcagacagagggcagcgatgctcttaccacactaatatattttaattttttcagttatttctaatgatttttttctatttaaaatataatagacactgctgttttctgtttaatcaatactggcaaggaaattctcggcggcttcattgaaattctcttcagtcattgaaaataacagctggattgtttttttaaaatccatcatatattttaattagcattttcagttttactcaacacatttttttggtcatttttatattatcgagaaaaacttcatatcacattctgttattctcaaataacagcttataattcttgtattaatcagtatatctgtgtgccactggtcaaaatacggcaatctggtgtataccaatttaataataaaacaaatccgtgttacgattaatgaatttttatacaagactatcagaagagcgttttaagataaatggtgatttgagatatacaaaattatatttcggaatgttgactgaaagccttattagaagacatttaaaagggaaggggtatgttgaacacaaatattcagaaatgtttctctggatgctgaaaaatagtagaaaaaagattttgagctgagaacataatttaattttggttacaaaaatttcagttgagtcaaaactagaatcattttgttgcaataatttacttgtattaatttaacttttactactttttggccctgagaagtgtttcttggtttgtgtgtcaaatttactaaaaccatctcttctttccactaactaaaatgtaaatgtttattttgtatataatacatgtcttatattatttttgttgtaatataatgattaaatggtgtattaggccggaataagaatgaatgttatttactgtaagtgtatgtattgtacatttgtgtttattcagtgttattatgtatatattattatcatgggtcattaagtaaaattcttaaattagatattataaatattaaaagaaaaatgtcaaaatacacaatctgtttccaagtaataactgttattaattataaaatttcagagaattaaaaaaaaaagttaatttttatatgattccttttaaaagattgacaaataatgtattcagaaattattgttttttattgttactctagagtaataaaaagaaatacttggattgaactgtaatgcattgcttttcaagtaaaattgaaaacagaataaatgtatcatct

SEQ ID NO: 266 - DNA, 2225 bp, Nezara viridula
ctttaggaataaacattgttttgaatgtgattctgaagatggatattacagaacagttatctgaggaaggatggaaactatctcctgaaggctacaatgttattactgaagatggaaaaattactgatttagcagtgataaaaaagaaagcactagatattgatttaagagaattaggtggttgtgcgttcccccctgaaatgaacaaagggaaatatgaatctgttactggtaacatggttgttcaaatacaaaaaatcagaaatatttcggaacctaaagcaaatgaggaatcaaaacatgctcctagaatgtttaaactaattctaacaatgtttaaactaattctaactgatggtactcagagttgttctgcattagagatgtctccacttgttgatattaatttcaacacccctcctggtaccaaactgaagttgaagggagaaatggttattagccacggtcttctgttactacataccgaaaatgtcgaagtcctaggaggcagagttattgtcttagttgagaaatggcttacgaacaagaatctggccaaacaagcccgaggtcgagttggagctgaaggaggacctccaccttggataccgtttggtgagaagcttgctccttctaacatagccgataaaaatttcaagtccttagacgatggatctaaagatggtagggataatgaagaatttgaagctcagagacgtgatgctatagctgaagcaggaaaagcagctggctgcacaaaaaaagtttttggtggtggtacaaaaccacttcttgatagaaacatccaagcaattatgtctcaaggattcacaattcaggaagctgaagctgctctcaagcaaagtaaaaataacattgacagggccttgaggaacctccagaggaaaagtggtaaaggtccagatgacaaagaaaagactgaaaaagaacctggtcgtgagcgaggtagacgtaaaggtaatgatgaagaaagtggacccaaaccaagtggaagagtctcacttttctcatttctcgaagacaagttgccatcattaccagaaaaagataagagcaaagaaaaagaatgggaagctccaaaacaaaattatgaaacaaataataaatctaaaagttatcctggtcaagaaaaaaataggaaccgaggagatagggggccacaaaataattttatcattggaaatggtatagataagaaaaaagatgaaaggcagtcgaggtggcagaatcaaacacagaaccaaaaacctcctcgattccaaaaccaaaatagaagatctgaatctaacaatgacccatttgatcactttgctaatagaaatgatcagcaaccaggtagacaaaatgacaactattttggaagtaaagctagtccacctcaatataatggctacagaaataattacaaaatggattctataggttataacttaaatagtggaggagactatagaaatcagaattccaactatttcaaaccagcaggaatgccagatattccagaattcccatataaagattctgcgttcattccacctttgttgccaccttcttcaaatcagttcatgaattcttcaaaaaataacgttaatcacaacacaactcaaaaaccagaaagtgcaggaaagtatagatggaaagttggagataagtgtatggccaaatattgggaagacaatgtttactataatgctgaagttacaggtatttcaaagaaaacctgtgtagtgaggtttctagaatacggtaattttgaagaagttcttcaagatgattgcctaccgatcactgaggaacctctagaaaatattaacttgcaaaataatgatcatcaaggttttaataatagcaacaggaataatcacttctcagggtcgatagaattccgaagaggaggaacaaggccttatataaagcctgagtcagcagctggtcgaaagcagaggtactcgcaacccgtatacgtaccccctgcaagtaggcgagaggccaagtagcatgtagtctatgggcgactggccctagcgtgtaaaacttgaaattgagcatgtaaacatgcttagtatatttacacttagatattctgggtcattttacgtggattaaattgactgctccttagatctgagtgattttttttctcaaagaaatatatctaaaatcactaatattctgataaattgtaagaattttgtattgttttt

SEQ ID NO: 267 - DNA, 570 bp, Nezara viridula
ctgaaacaaagagagtagaaagcttttccaacattcaaaagcttgaaaaaaaaattgaactttgtaaaatggagattgaatggtctaaagtagaaaaaattaaatctgcagcaaaaacactagaagtggaacttattacacttaacaatacagccaaggagaagcaagacacactcacagcgattatggaagagtctgaaaagattaaacaagaaaagaaagaacttgctactgaaaataaaaatttacaagaaaagaataaagcaaggctcgatgaaatagaaagcgaaatatcaacaaaggaggtgaaaatccgatcaattgaacaggatctagaggagttggagaaggacaataattacaaacaggatcttataaaaaaatttgaactgtcgaatacgtttgtcgataagagagacgaactctttgagcaaaagaagaaaatagacagcaaagaggcggtgataaccgagagactcgagaatttgaggtatacgatcgaaaataaagaagagaaaagaaatcaagaaatagaaaaccaaaaggcgtatgaaaaaaggctttggaagg

SEQ ID NO: 268 - DNA, 3955 bp, Nezara viridula
ctcagtcagagatacatctcaagtgcagtacactgtttggtcagataacctctagatattattttcgtgaattgtcattatatgttgatcttataatttttgtttttgttatttttcgtgattgatagtaacgttgattattttttcggtcattggaatatactgaataaaattttagtattgcactttttctctttgaagatagtacacaataatgggcaaaaaaggaaagaaaggtggaggaggagggggtggtagacaacctggagaagcaggggcttctaatcaacctcaacaacaacaacagcagcaacaacaacagcagcagcaacaacagcagagaccacagcagcctcagcaacagcagagaccacaacagcctcagcaacagcagagaccacagcagcctcagcaacaacaacaacagcagagaccacagcagcctcagcaacaacagcaacagcagagaccacagcagcctcaacaacagcagtggcaacaaccgcctcagcagcagcagcagcagaggcaacaacagccgcagcagcagcagtggcaacaacagccccagcagcagcagaggcaacaacagcctcagcagcagcagtggcaacaacagcctcagcagcaacagaggcaacaaccaccacaacagctgcaaaggcaagaaccaccacagcagcaacaaaggcaagaacatgctcctcaggattttccattacctggagcaggtgatttcaattcaaaaaggaacaaaaaaaagggtggaagacaagcacaagctggtccacaacaggaatctggaccaggaccgggtgctgtaccaccacagcaagctattcaacatggccagcctgcacctctacaccaacttcctcaagagcaaaggatgcaacaacctcctgcttttaccgttggtcaagttagacaagccgctccaattaccagacctcaagcaatggaacaacagggacctcctcgacaaccatggggtcaacaacaacaacagcagcagcagcaacaacagcaagctcgcttccctttgcaaactggtcctagaggtcaaactccatgggcacaaagaggtccacctccccagcaagtgtctcaaccacagtctagggaaacaacccctacccaccaaactcaactaccacctcaacaacaaccagtatctcctgtaaccagtgcacctcctgttaggcaacaacccggtgaccagcaacccagcagaccaccttcatctcagcctcaagtacagcaacaagcggcaaagccaaggtctcccgctgaaggtagtgctttagcagaaaaaatgagaaatatagatatcaaatcatcgtcatacattccacccaaaagaggggaccgcccttcagatccaaaaaaaggaagagaaattgttgtggaaactaatcatctcaatttaaatataaagaataagaatatggttattcatcattatgatgtatctatcaatcctgaaaaaccttatcgcaattacagacaagctgtggaagctgttcgacagaggtgtttcaaaaatcgatttcctgcctttgatggaaagaagaacctctatagttatcctgagttgcctctccaaaaaacggaacttgttgagaccgtgacaatttacgataatgaaagagatcaagaaaaagaaatgaccgttacgataaagtatgctacgcaagttaatgtctcaatgatatgggattatctgagggctgggacttcaactaatggtccgcaggaggcaatccaagctcttgacattgttttaaggcaaccagctgctaacaggtttgtgacagttggaagatcattcttttcacctccacctggtagagtaattgatcttggttatggtcttgacctttggtatggtttcttccagtctgcaattattggttggaaaccattccttaacattgatgtggctcacaaaggattcccagctgccgacaattgtgttgttgctttaggtaaatttgttcaaggagaccttggagatccacgttttcaaatgagaccttatgaacgtgaaagctttgttgcgtatattaaggatttgaaagttgtttatgaaattccatcaaagagtgttaaaagaacatataaagtgactaatataacaacttgtccaagagataatagattcgagattactgataaggaaaccaataacaaaagtgaaactactgttgaaagatattttgttagtcaatataatattagattaaagtatcctcatctaccatgtcttactgttggctcacgagagaagcctttggcgcttcctatggagttgtgtacaattgttgcgggccaagttacaatgaagaaaatgaatgatgctcaaactcgtacaatggtaaaagaggctgcagttgatacagaaagaagaaaagaaaaaattgtcaagtctataagacaaatcaactttaatagtgacccatgcctgaaggagtttggcctctcagttgatgaccagttcactaaagttaaggcccgaattatgaatgcaccaacacttgattatcgagaaagaccggtacctgtaagacaaggagtatggaggaatgaaaaattcattcaaggagccgatttggttcagtggagaatcgttactactaatcagatgattagagaaccagatttaagaaagctagcatcgggtttaataaatcatggaatggaatgtggcatgaatatatccaataattataaaattgtttccaagaatactcctcgtgaacttgaacaatattttagtcagtgtcttaaagaagaagtaaaacttgtgattgttgtcttacctgatagaggaatgacttatgcatccattaagaaaattgctgaaattcaggttggtattctaactcagtgcttgaagactgtcacagtgcagagaagacttaatgctgcaacatttgtaaacatactacagaaagttaatgcaaagttgaatggcatcaatcaccatataacccacagctattggccaaaattttttcaaaaacctgtcattgttgttggcgctgatgtcactcatccagctccagaccagatcaacgttccatctatagcagccgttgcagcttctcacgacccaaaagccttcaggtataatatgatatggaaactgcagccacctcgagaagaagtaatcagggatcttgagagtatcatgaaagaacaattattggcgttttacagaagcactaggtataagcctcaagctatcctcttttacagagatggtgtgtcagaaggacagtttaaaatgatcttgaaccaagaattgcaggctatcagaagggcttgttcaagcctcagcagtgattacacgccaccgattacatttatagtggtacagaaacgccatcacactaggttctttccggaaaagaaggatgcagatgggagaaatatgaatgtgccggctggtacagttgttgatacagagattactcaccctactgaattagacttctatctagtcagtcatgctagtatacaaggtacagcacgtcctaccaaataccatttgctatgggatgattctaatttatcagagcagaatttagaagaaataacttactatctttgtcacctctttaccaggtgtacacgttcagtttcataccctgcacctacctattatgctcatctcgctgctttccgtgctagggcatatacagatgcagacagactacagctgaaccaacttcaagaagaacaggttagaaggacagttaaggattctgtttgtaagaataatccaatgttctttgtttaaagaaaaaatgttaagaattgtaatcttatatataccacctttattcatgaaatatgtatatagaatttgatatatataaaaaaagttacttattacttttttgtaacattctactattgaacaaataataatgtgatattaaaatatttt

SEQ ID NO: 269 - DNA, 4097 bp, Nezara viridula
gagaccacagcagcctcagcaacaacagcaacagcagagaccacagcagcctcagcaacaacagcaacagcagagaccacagcagcctcaacaacagcagtggcaacaaccgcctcagcagcagcagcagcagaggcaacaacagccgcagcagcagcagtggcaacaacagccccagcagcagcagaggcaacaacagccgcagcagcagcagtggcaacaacagcccgccccagcagcagcagaggcaacaacagcctcagcagcagcagtggcaacaacagcctcagcagcaacagaggcaacaaccaccacaacagctgcaaaggcaagaaccaccacagcagcaacaaaggcaagaacatgctcctcaggattttccattacctggagcaggtgatttcaattcaaaaaggaacaaaaaaaagggtggaagacaagcacaagctggtccacaacaggaatctggaccaggaccgggtgctgtaccaccacagcaagctattcaacatggccagcctgcacctctacaccaacttcctcaagagcaaaggatgcaacaacctcctgcttttaccgttggtcaagttagacaagccgctccaattacgtcaagttagacaagccgctccaattaccagacctcaagcaatggaacaacagggacctcctcgacaaccatggggtcaacaacaacaacagcagcagcagcaacaacagcaagctcgcttccctttgcaaactggtcctagaggtcaaactccatgggcacaaagaggtccacctccccagcaagtgtctcaaccacagtctagggaaacaacccctacccaccaaactcaactaccacctcaacaacaaccagtatctcctgtaaccagtgcacctcctgttaggcaacaacccagtgaccagcaacccagcagaccaccttcatctcagcctcaagtacagcaacaagcggcaaagccaaggtctcccgctgaaggtagtgctttagcagaaaaaatgagaaatatagatatcaaatcatcgtcatacattccacccaaaagaggggaccgcccttcagatccaaaaaaaggaagagaaattgttgtggaaactaatcatctcaatttaaatataaagaataagaatatggttattcatcattatgatgtatctatcaatcctgaaaaaccttatcgcaattacagacaagctgtggaagctgttcgacagaggtgtttcaaaaatcgatttcctgcctttgatggaaagaagaacctctatagttatcctgagttgcctctccaaaaaacggaacttgttgagaccgtgacaatttacgataatgaaagagatcaagaaaaagaaatgaccgttacgataaagtatgctacgcaagttaatgtctcaatgatatgggattatctgagggctggaacttcaactaatggtccgcaggaggcaatccaagctcttgacattgttttaaggcaaccagctgctaacaggtttgtgacagttggaagatcattcttttcacctccacctggtagagtaattgatcttggttatggtcttgacctttggtatggtttcttccagtctgcaattattggttggaaaccattccttaacattgatgtggctcacaaaggattcccagctgccgacaattgtgttgttgctttaggtaaatttgttcaaggagaccttggagatccacgttttcaaatgagaccttatgaacgtgaaagctttgttgcgtatattaaggatttgaaagttgtttatgaaattccatcaaagagtgttaaaagaacatataaagtgactaatataacaacttgtccaagagataatagattcgagattactgataaggaaaccaataacaaaagtgaaactactgttgaaagatattttgttagtcaatataatattagattaaagtatcctcatctaccatgtcttactgttggctcacgagagaagcctttggcgcttcctatggagttgtgtacaattgttgcgggccaagttacaatgaagaaaatgaatgatgctcaaactcgtacaatggtaaaagaggctgcagttgatacagaaagaagaaaagaaaaaattgtcaagtcgataagacaaatcaactttaatagtgacccatgcctgaaggagtttggcctctcagttgatgaccagttcactaaagttaaggcccgaattatgaatgcaccaacacttgattatcgagaaagaccggtacctgtaagacaaggagtatggaggaatgaaaaattcattcaaggagccgatttggttcagtggagaatcgttactactaatcagatgattagagaaccagatttaagaaagctagcatcgggtttaataaatcatggaatggaatgtggcatgaatatatccaataattataaaattgtttccaagaatactcctcgtgaacttgaacaatattttagtcagtgtcttaaagaagaagtaaaacttgtgattgttgtcttacctgatagaggaatgacttatgcatccattaagaaaattgctgaaattcaggttggtattctaactcagtgcttgaagactgtcacagtgcagagaagacttaatgctgcaacatttgtaaacatactgcagaaagttaatgcaaagttgaatggcatcaatcaccatataacccacagctattggccaaaattttttcaaaaacctgtcattgttgttggcgctgatgtcactcatccagctccagaccagatcaacgttccatctatagcagccgttgcagcttctcacgacccaaaagccttcaggtataatatgatatggaaactgcagccacctcgagaagaagtaatcagggatcttgagagtatcatgaaagaacaattattggcgttttacagaagcactaggtataagcctcaagctatcctcttttacagagatggtgtgtcagaaggacagtttaaaatgatcttgaaccaagaattgcaggctatcagaagggcttgttcaagcctcagcagtgattacacaccaccgattacatttatagtggttcagaaacgccatcacactaggttctttccggaaaagaaggatgcagatgggagaaatatgaatgtgccggctggtacagttgttgatacagagattactcaccctactgaattagacttctatctagtcagtcatgctagtatacaaggtacagcacgtcctaccaaataccatttgctatgggatgattctaatttatcagagcagaatttagaagaaataacttactatctttgtcacctctttaccaggtgtacacgttcagtttcataccctgcacctacctattatgctcatctcgctgctttccgtgctagggcatatacagatgcagacagactacagctgaaccaacttcaagaagaacaggttagaaggacagttaaggattctgtttgtaagaataatccaatgttctttgtttaaagaaaaaatgttaagaattgtaatcttatatataccacctttattcatgaaatatgtatatagaatttgatatatataaaaaaagttacttattacttttttgtaacattctactattgaacaaataataatgtgatattaaaatattttttgtgtttacttttatttactgaaaaacaattattttatgtttgtgtaatttgtaaatttattcgattctgaataaatttggttatattaaatattcaaagaattatttaattttgaactgggtatagcttgaaatgttggttttatttattaataaataaacttatcttaacaattgtttaagctttaaaggaaataatttaaaatattgaaaaaatataaacaactcaatgattggtctggtttgtggtgaaggactttattttttagccttgattgtcttgaatgttcagtctcaatatgaaagtcttgtcctaattacaaaatcattcattgttattgtattcaattattttttatgagacacttaaacactttaagaactgattttatttgtttaagtttacactaaagattgttaaaataataaagtatgttttattttaaaa

SEQ ID NO: 270 - DNA, 3225 bp, Nezara viridula
gcgttagtaaacagttgtttggaagaatcaagttgttaggttatactttgttttctgttataattcgttttttttaaaagttttccaccgtcataaataaaacagggaaggatttaggtcctttgtaatttaagaaaaaacgagcagtttaaaaaaggagctttgagaatgtaatcgttgatgatatccaaaagattttaccagttttgttaagtgcttcaaaaaatgttttatatttattaagttttgaagtgaagtccctcgttatatcaggaagttttcaagtacgcaagatttagaactatatttggttttgacgaaaagaacatgcaccataataatcgtagacagccagaaaaatgggttgacttagatgatgtagacaaagaagaatcagacgaaaatattttaactaaagataaaagtgatgatgaaacgtcgaatgaagaaaatataaaaaaagattttgtgaaaaagaggattctgggaaagagaggtaatcctattacggtcacaataaattatgttcctgtatcgtttactgaccccaccgcttgtgtttttcactaccatgttcgcatcgaaccagaaccaagccgacttaaactttgcagaaaagtacttgagataactgaagccgagaagtttccgaattccacttgtgcatttgatggtagaaaaaacttatatacaacagaacctatttcagctgatcaaaaaagtacaagaatatcggagtcagttaagatagtctccgaagagaacactctcaatacaataaaaagatccaacgaagtagagagcaggaattggctaccaacttggtttcagtatcgaagctcttcttataaagaatccaagtccgtatctgttaaattatcggtcttcaatatggtatggctttgggatgaagatatgctagcgaaaagaagcttcaagttatccgcacaactcaatgaaatcttgagatatggcgagatgtcgaatgcaacacaaaactcttcagcgcttttaaagaaggtagtcgcggccgtggagacaattattgctgaaaacgctttaaaaaaatgccaagaaaggaaactgacacaatctggagatatactttttacaagatactcagaacccgctggacatataaatggaggaataaatttacattttggattcaggcagaccattgtcaaacagtcgcccttgtttcattataacttttttatggccattgacatgacatatggctgcttcttcgacaccttatccgtgatagattttatatctctcattttggacaggatgaggaacagcctcagggatgggacacttgaaccttgggagcatcaagtggtcaaaagttacctaaaaggggtcagagttatctaccaggatcccggatatgctatgacgaacagagagcatattgtaagtgacgttgctgccagtgcagaatcgataagattgaaaacggggcttccaagtagtttcaacaaccagggccaattctattcgttaggaaaggtcttcgatcttgaatttccaaatatgccgagtctaattgttggaccgccaggtatgatgttaggactccctcctgagctgtgcactattgctgatgggcaaatttttaacaggaggatgacagattcgcaaaaggaagcactgaaagaacttctgttagagctcaaacctaaaccaaggcagataaagagtgaaatcattagaatgatttcagcccttggactggaaaggaataattttttttccgagttcggtattcacattaataaaaatttggttcaaactaatgggagagtgctgaaaccaccaataatagtctgtaaatccgccatgctatcaggaataaaacaggtttcaccatctgaaagttcgtgggatttggaacattttgaaaatgctgttgaaattgataaatgggccatctgcaatgtagatccgacagaagacccagatttactgtttttggcaacagcattgcgttttagaggtctacgacttggaatgaaaatagatgaaccaaaattttatcccaaattggtacaagctgaggaagattttgaaaaatattttgaaatatttttgagagaaaggaaatcagaaaattgtgaagtggtgttggtagttatgccgaacagtggagtattttacggaaaaatcaagcaaatagcagaacttcaagttggaatactcacacaatgcttgaaatcatcaacagtaaaaaaacttgatttatctattatgaatagccttcttttaaaactgaatgcaaaattaaatggaaattgttataacatcaaatcttcactttggcctaaatatttcatcagacctgttttagtaattggtgcatatgtaaatgttaatgatcccaagagaagttctagttttccttttatcgcttctattgttggaaattataatagacatgctactaaacataatgtgatttggagttttatgaaatcagattcagatcatattgaaaatctagataagataatcggagaacttataatccattattggcaagagagtggcgcttatcctgaaaagatactgtattaccgagaaggtattttagaagataatatttgggtggtcatggaaaaggaggcggcattgataagagaaggttgcttatcactgcacccattctaccaaccatctctcaccttcattgatgttacaagaaatcactccgccatgtttttgccgaacaagcaggccgatgtaccagctgggactgtcgtagattccaccatagtccatccaaaccagatggaattttacctcatgtcgcacctgtcttatctgggagctccaaggcctacaaaataccacgttttgatggatgagtctcatctttccgaagacgatattcaagaaattacattttacctttgccatttaagctgcagatgcactcgctcagtaccatttcctgtacaactctactacgctcgtctggctactcaaagagctcagaaatattttgatgggaggtttatggatgatgaagaaatagacaagactatcaaagaaattttaaacgttaatgcccttcttgaacacaatccaatgtttttcgtgtaaataatctcaatatagcgaagatcgaccgaaaatgtataggcaatagaaaactgtatattgtttattttagcttccatctactgtaatcgaaaaataaagaatattttagacggg

SEQ ID NO: 271 - DNA, 2639 bp, Nezara viridula
agcctgcttaaggaggcagtgtactagtcatagtttacattggacgattcttggtaggcgtttcattagaagtgtcggtaacacacagttgctttttgtaaatagaaagtacaattcattatgggagacagtgaagacgaatatgacaaaaaaagacgagataaatttcaaggtgaacggagtgattcatataggactgataaacgcaaagacgatgactggggaagacctaggatgaggaatgattatcgcgataggtaccagtaccaaggtgatttgccaccaaccaagcggatgagatatgactcggatgatattaggaggatgaggtataatgatcctgggtatggtccatacaacagttggggacctgaaccaccctatccaggaaattcaaggttaggtgaaatggatacacagcctccaatcatgacttttaaagcttttcttcagtcccaagatgacaacataactgatgaagaagcgatagctaagtatgctgagtacaaacttgaatttaggcgacaacagctgaatgaattttttgtggctcataaggaagaagaatggtttaaactaaaatatcaccctgaagaatctcttaaaagaaaagaagaacttaatggtgccctaaagaaaaggtgcgatgtttttcttgaaatgctggaatcaatgcgcatggatgatataagagtagatacagagcaaggagatgaagttgtcaaacttctagattctgtagtgattcgactggaaggagggactgacctggatttaactattcttgatcaacaagaaggacagaaggatgagcaaaaagaaaaggataagagtgatgataaacctaaagaaaacaataagtcggatgaagaagaagtaaaaaagaaagaaaatgaagaaaataaagatgaaattgttattgatgaagatgatgatcgtaaagaggaagaagaaaagaatgaagttcatgaattgtctgaagatgaaagacctccaggagttgatcctgaaagtgatattgaaaaggaagatgtgcctgcagagaaagaatcgccaccagaaaaagagacacaagctgctgaagaaaaggaaccatcacctgaaaaagagaaaaaagaagaagtaaagaaacctaaagatgaccaagattctgacaaggatcatgatgaagttgttccattaacaccacgagcactacataaaacttcctctatttttcttcgtactatttcacctagagttaccaaggctgaaattgaatcgatttgtaagaagtacccagggtttctcagagtatctctctctgaacctcaagcagagcagcactggtatagaagagggtgggttacatttaggcgggatgtaaatataaaagaaatctgttggaatttgaataacatcagagtaaaagagtgtgaaatgggagccatagtgaatcgagatttatcacgtagagtaagatcagtgagtggactgtcaggacataaacaggttatcttggcagacttaaaattggctgcaaaaatcatacaggaattggactcaagagctggtttctgcaatcctgatcaaagcgaaacttttggattggaatcgagaaatgctgtttttaaaggtattactgaatatctggttgaagaagcacctgcagaggaagaagaacttttgggtcaagacattgttactgatgaatccaagtctcgaatagcgggtgcaattaagattttagataaattgcttctctatttgaggattgttcattctgttgattactacaacacttcacaatatacatcagaagacgaaatgcctaatagatgtggtataatgcatttaagaggactgccttctagtactgaggtttcacctcaagaaatacaagaatatatagacggttataaaacgaaacttgaacccttatatactcccgtaccgactgtttctgaacaagaattagcatcattaggtgctaaggatagagatactgaagtagagaaattcatacaagctaatacccaggaattagcaaaagacaagtggctatgtcctttatcaggaaaaaaatttaaaggaccagaatttgtcaggaaacatatttataataaatttgctcaagaacttgaagaagtgaagaaggaggttgattattttaataattaccttcgagatccaaaacgcccacagttagctgaacatcctggaaataggggtggcaagaaggagcctgaatctccttaccattaccagtatgggggtggtttcaaacgtggatttggtcattttggtggacatggtggtttcaaccgtggacgaggaggttttggaaggggaaggggtatggactacaggcctattattacttatagggatttggatgcaccatgtgagcctgatgaaattatataaatgcagtcttacttttatttattatatatttaactatctatatgtttaataaacatgaatataattgtgatttgcatttatacatttgtctattgttctatataacaattctttttattaaatcgacaaaattatatttgcttttggtttttttgtactccttttaaattaatgttttaatttgatagttaaaagaaatgtgctgaaaaccaaagcattattattgcccccag

SEQ ID NO: 272 - DNA, 5590 bp, Nezara viridula
cttaaatcgattgtattttctttggaaatgaaatgaaacaagcatacatcaataatatggaacaactaaaaagttcattaattactttttccaggcaaaaataatctataaaagaactaaaatgggttgagaaagaagtggggaggttcagtagcgatgcgaaccttatcgcgattggaggggtaggttaagcgattgcgttgggttgtcacagacttcagttttattggactcttattttaacttttgattttttattttctttttatatttatttgtgaaaagtaaagtttcttggaaattgcagaacctatcagaaatgagtaatgttattgaagattttaaacccagggagtatcaagcagaactctttgaaagagttctaaaagaaaatacaataatctttttacctactggctctggaaaaacgtttattgctgtaatgcttattaagcataaatcaaatgaattgaaactattatattctgaagggggtaaaagaaccttttttcttgtggacacagtggcattagtcgctcagcaagctcagagtattcgacagcaaactccgttaacggttggtgaatatagtggtgacaaaggtgtggaccattgggacatcaatcagtggcatgaagagcttgaaaatcatcaggttttggtgatgactgctgctattttttatcacatgattcttcatagttatatcacgttgtctcgtgtcaatctattagttatagatgaatgtcatcatgctgtcaatagacatcctatgagattgatcatggatcagtttaaaggaattcctccagaggataggccacatgttcttggtttaaccgcaacacttataaattctaattgtaaaccagatcgtatcctgaaattgattcacaacttggagatcacattccatgctaaaatagccagagctgaaaatgaagaaatgatccaagcattttctactaatccaaaagaagatattgttcattatgatgagtggcaggaggacgaatgttatactgttgtgtattcttttatagaagaaatgtttgctatattgaattcaataattctctttgataattctccaaaaccatctgacagtcctccaaatgctaccctaataaacaacaaatcagatactatcaatgaaatccaaaatattcttaaagaaatagttcttatcaccaaagaattgggagcttatgcttccacttacgttttactcctacgaatagttttttttgaaagaatgaggatttctgctaatgatccaactttaataaaactcttaggtcatgttataatacagcttcatttgattcgaaaaaaacttgatctcattatgataaaaggacctagaagaataataacttattcaacttcaaaggtgatagaattgttccaattattaaaaaatttcaaaaaggataatttagctcttgtgtttgttgaaagaaagacgacagctaaagttatgtactatgtacttgaagatttagcagcaaccattgaagaatacaaaaacataaagcctgattttatcgttggtgtaaacagcaacccatatcatatcacacgggagtatattcttgaaaggaaaaaaaatcacatgattctgaaaaaatttaacatgggtgagacgaacatattggttgcctccgatgtgatagaagaaggtattgatgtaaagaattgcaattttgtcataaaatttgattaccctaaaacaacaaggtcttatattcaatccaaaggtcgtgcaagacacaaagacagcaaatacattgtatttgctccaaacgaaaattctgactcatttcataaaaactattcaatttttaaattagcggaagaaaccctaaagcaggaactatgctatggcaaagatcgcagcagaaagggtggaacggaagcagaagccgaaatatttctgtacaccaaagaagttgaaccattttatattaatggaccaacaggaccaaaagtgacagttgaatctgctattcctttgttgaatagatattgttttacattaccttgcgataaatttaccagacttgctgtatttttttggaaggaggaaatcattgagaataataaaattaaaattgtatgttatcttcaactgcctgtaaattgtccactgaaagggataataaaggggcagccatgtgaaaatcttgttactgccaagggagcagttgcactaactgcatgtaaaatgttgtacaagatcggcgaacttaatgatcacttactacctgttggaaatgaagttcaagacgatgaagaaaaaatactatttcctctctgggtaaacgaaaatgatcaagaaaactcccttagtaagcccggtactaaaaagtgtcgtcggatctatgataaacagttttccaagtggatttgtggtggttttccacaagcaggccagcctatctacatccacgttatcaaaatattacccaactacccaaaacctgataacgttaggatattagcattttacaatttacttcaatcgaataagaatttcgctgtacttagttcaaagaagtggccgaagctatgtgattttccattattcatgaatgttggtgaagtgagcataaatatacaacagaatgcgcgacgaattactctcagccaggaacagtgtgaacaaattttggccttccattctttgttatttactgaagctttgttacttaaaaaagaatttttagttagagcctttgaaaacaaagaaaactcatattacattgtaccgacgattgttgaaggagacagtatcataattgattgggatacaataaaaaatcacaaacaaattcctccggtgaaaacagtgcctttggataccagaggggaggtagttgtttcaaaagataattatctcaataagatagttataccatggtaccgcccaaaaggatacatgttgaaatatgttgtaacaagagtatgtgaagagcagacacctatgtcgccgttccctgcagagcaataccgttcatattctgattatttttccaatcgttacaaccaatctattgttaataaaaatcagaaattaattgaagttagagctatatcaggaaaaaacaactgtttgttgccaaggggaaaataccggtttggtaaaaaaagacgacgtgatgaagaagattttgaagagacattagtgcctgaattgtgtaccctcttagaattccctgcagtttatatgttgaaggttactttattgccttcaatattacatcgtatcacgatgctgctaaatgctgaagagctccgccagaaaattgcggatgaaacaggattaggagttgtaaagcttccaaaaggtgtttattggaaacctttagaagttgatgatacagccttagctggagaagaaacttctaatgctagaagtacggttgaggtcagtaatatgttggccgataaaatggttgagctgcagcctaaagatttcacgtggaaaaaagaagaagaaccgatggatatagaaagaaatttgagaaatttagatctgctttcagttcttcactacgaacaatttgcaaaaattgaaatttctcctgagcaaattaataaatctaatggtatgattttgggaaaaggctcttcaattaggagtaatataataaagccaccaaaagttaacgcacctgacattcctattctattcaataaaagctctcctcttgggccagaattgggttctatcttgaaggccttagtagcgagctctgctaatgacgttatgaattatgaaaggctagaaacattgggtgattcttttttgaagtttttagtttcattaatattatttatcaactttgaaaacaaggatgaaggtaaattgagcagcatcaaaggaaaaataatcgggaatagaaatttgtactacagcggaaaaaatttaaacctcggaaaaattttgaaggttaatgactttattcctgatgactgggaagttcctggatttacaattttggagagcattaaagaagttataaaaaatgcaaaaattccaccttccgtgctctatcaaatcagtctaacaaaaaaagaaagagacacagcggttttaaatgaagaaacattagaaagcattcatgagttattctgtaattctacaccagctgatgatagtactcatagcagcttgggagtcataggccagcaatgtgtcgttgacaaagttgttgcagattctatcgaagcccttataggggtgtaccttgaggagtgtggtgttgaaggtgcatttatattgtgtaaatggttaaaaattctccctgaagaaatgtctgatatctacaaagtattacatgcaccagcaccttctgctcaaatattagatcacggtgatgtaaatgatgtactcattatgccggaagttctggaatcaatattgggctacagatttcaagacagaagttacctcttgcaagctcttactcattgttcttataggcaaaactttaccgattgctatcaaaggctggaattcctcggtgatgcaatcttagatttcttgataacttcctacatttataacagatgcaaaaatatatcacctggtgaattgacagacctcagatcggccttagtcaataatgtcacatttgcatgtttgagcgtacggtatggcttccataaatttatgcttactaaggcttgtaagctgactgatatcattaagagatttgttgaacaccaagagaagagaaatcataaaattggtgctgagatattatttcttctgagtgaaaatgaggtaaaagctgccgaaatcgtggatgtgccaaaggtccttggtgacttatttgaatcattagctgcagctatttatttagatagtggaaagtctctaaatactgtttggaaaattttctatagattaatgcacaatgaaatagaggaattcattggaaatattcctaagaacagtattcgacttctttatgaaaaatttcctcatccagctccatgttttgagaaaccggaattccttaatgagaataaagctatcgtcatggtgcccctagttgttacaactaagaatgagaggatggcgtttgtcggagtaggagaaaacaaacaccaagcaaaattagcagctgccaaggtagctctgaggcattattatctagatccaatgtgattaaaaagttaatttttgttttattataatttttactgtaaataatcttccttattatttttacaatgaagtttttataaatttttatttttttgaatttatctcttaagttttattggaataatagtttttctagtgtttatattaaatatatcactaaacattgtagcaacataagctaatggataatatttcaagactgaatttgagaaatgtggtaatgtgatgtgatttaatgcaagttaaggttgtaatatatatctattgtatatatacttatttgttaccattttaatgttaatattatttttaatactatgttcttatatatatataaacatccttttttgtaatcatgttggtagtataattattatgtaaaaagtaccaattatgtgtcttatgtattac

SEQ ID NO: 273 - DNA, 3345 bp, Nezara viridula
gtgcaaatcacgataaataacggaagtaactatttcataatacttggatgttcttcgtaattatgtagcaccttcgtagaatctaatctaattttgtccgacttacgtttgctaaattcaatggatatgatctgtaacaacctgacgaagttcatatcaggtgcttttatttgttagcccgccaagttatcagctgtagagataaccggtaaagcagtaaattactataatcttcctgtttacaaacatatttatctaagttttatggcttaaaagtctaagattattggttagctttaatgctttgagatgcacaacataagaaacttttaatagttattacatcctataatgattgtttcttttttatttttaattaattatcttttaaaagttgtccaaactaggaaacttaaaagtgctcattccaaaaaacgtccatgtcatattaacgctattcaactgctaaattgtttaaactttgaaggaatagctatcagagatgatgatgtgggtattagatttatgccccctgcttacaatcaaagataccaagctgtttataatgttttagttcagttgcaatcaatctacgacattaaaaagattgcagacttaggatgctcagaaatagctttctttattcagattaagaggcttgaaactatagaggaatatattggagtggacattgatgaagatacacttgatagatgttcatgtagagttactcccctgaattacgattacttatcatcaagatgtgcaccgttgacagtgagaattttacttgggagtgcttcaaagcctgatgtgagattgaaaaatacaaatgccgttgtagctatagaactcattgaacacttatatcctccagaattggaagatctgccttacaacatttttggtgttattcaaccagatgttgcaatatttactacacctaatgcagacttcaatgtgctctttccaagccttctaccaaataaatttagacatcatgaccataaatttgaatggagtcgccaagagtttgaagattggggacacaatctaaccttgagatatcctggttatgaagtttggtttaatggaatcggtaaaggaccggttggaactgaagatctcggctgctgttctcaaattgcagtttttattagaaaagaagtaaaagctgaaagcaatgacttcaatatatactattcgattgttcgtgaagtggaatatccttttcaaacacgagaagaaaagtttaacaacattttggattatgatgttcaccaatttattgaccgattttctcaaaaagatgagtatttagttggagaacaattggagataccttttgtggatattattgatttccttagtgtttcgtgtacagaagataagctgaaggcatatctggaaaaaaataataaacatgttgaattaaaaaataaccgacttatattagttctgccttatacttcggatgatgatgataacaagtctctctcttcatttgatgaaatcattgaagaaatatgtgatcatgaagaaagttggattgttcggaacaatgattttattaatgactttgtgaataacgaagaaagttggaattatgttttaaaacatgtggatgaaatgaaacctgattcaagttccttcaatgatcagaccgatgatgtcaacaatttggcagatgatataagttttatactgggaaattctgaaaaaaatgaacagaataactctgtcttggatacggtttatgatccgaaacacattagtgtaaatgatctgttcttatctgatgaagaggacttaagagctgattctgctactccagttggagaaaatcaggttcaatatttaaatgttgatagtgttcttcagcattctggttcgacaggatcaggtaatacttctaaatcaagtgatactctggtagaaagctttttatcaccattaaatacagccagaagctgtatgaatgatgaatacaataaaaatgataccaattcatcttcaaaaggttctttttctgataaagaacaatatccatgttcatcttcaagtagtaaatcagttgaaatttcccaaaatgaaggtcaaaaagaaatccttgaaaatgaaacaaatgaaaatatagacattccattgaccagttcagagacccctattaatgagcctatagttgaagaaggtagcagtaattccaatgaagttccgtatgaccagtctctgtcacttgtaactaagagccaatctttagaaaatgtaaatatgtacaaatgtaaagacaaacgttttaggtatagtttaaacatagataataaattacttgcctgtgatactacagttgtagatatggatctagaaacgtgcaagggatcaagtgtacctagtcttacagaaacttatggtagtcatagtaaagctgtggacagcggctatcctaattcaacacaagatatggaactcgatctaactcctgaacaggtggatgaaatcattactgaaacagaatctagtctagaagatgaagattcttctgctgatgaaagggtcgagcctgttcatgttaaccctcctcttgtgtttgccgacaatgtagaaaatggagatgttgccaacaataacagggacggtgaaggcaacaatatggaaggaggtcaggtattaccagaggaattagtttttgaggatttagtaataggtggtggagaagtggaagctgcagcggatgagcatgaatcagatgatgatggacttttcctctcagctttagatgtatccaatgataccatagttcctgaagaaatgtcatcaaatgaagatactgtttatctctttgacttaccatctccatcttcatttggcagccttcaggttctagaagctactagtgtccaaaaccagaatcaatttccctcatggctattaaacatggaaatttgggatgatgacaatgggagtggtgatgcaggccctgacaggggtgaagatagtagtgatctagttgtagacagggaaggacaagtggatttttacccaggtgatgcaagggccggaggagagccgactctgcccgaggattaagtgattttatgtcaataataagaaactgacagcattcgttatgttttattattcaacatatcatttgtgaaagaatttattatttatatatctttatagttaagcgatgcattcagttttgaaaatgctttaaaagttagtatctcccatgtgccaatgctgaatgataggaaataatgtaattaagactgatgttaccatattagtcatctaaaatttttatttttgttattactgagaataaatttttaatgaaac

SEQ ID NO: 274 - DNA, 1731 bp, Nezara viridula
cttagataacagatatcttcactaaacttgcttgacatgtttaacattttgatggaaaatattgagttcatgttcgattaaattgagattccacttctcaggaataattgtatttttataaatactgaatgtttatggtaatactagcaattgacttccctgtaacattggattaactatggacttaaaaactccaatatcactacttcaggagtatttggtcaaagaaggtattttaccctgttaccaattaattcattgtggaagtggaactcatgaaccttcttttagttatgaggtcaaagccaaaggccatattgctgtcggcaagggtaggtcaaaaaaagaagcaaaacaagaggctgcgaagaaattgcttcttcaattgaatggagaggcaatttggaaaaaagaaataccaataatttcacctcatgtccctagtgtgaaagggaatgcaattggagcactacaagaatactgtgtacaacacagtatttcttatcctcaatatgagtatatctcagatgaaggtgatttaactccccaagtgtttgttgaacgatgtactgttttaacacactcagcggaaggtaaagcttctacaaaacagcaagccaaacatcttgccgcacaagcggtgttgtcgatgttacaaaaggttgaggagaaagttattgatatgtcatcaaacatagtcaaggaaaaaaaagaacttactgttaaaacttatgacaaaacaagggaggcttttcaaaaaacattaaatgaaagaccagatagacttctttcttccactaacacaatgaaaaatattttgaattttgctgattattttaaaaaagaaattggttctcgttcctctgcacttacttccttgaaaaatatagatgaaggactaatagaagcccatgaagaccctgaaggtctatttagacttattatggatgaattaggttacgaatttaaatttgaatttttgaattctaaggattcaggtgattgtttgtgtagccttttagtaaagaagatgagtattaattgcatcggtgcaggaaaatctaaaaatgatgcacagaaagaagctgcaataaatgctcttaaagtattggtagtaatgtctaaatcatagttactcaaatatataaatattttcaattgaattaattatatatatatatatacatgtgggagagacagggaaagtgtataagtattttgttattttttcatattgaattgttattaaaatttataaaactgtgcaattgcattcactttgctcaatactttaatatttaatgcagcggttcatacactatgtaacctagaagtgttcggttgaggtggtgaggctgtaccttgcctagggtcaatgttggcattgagtcctccccaatctcaggggaacaaatgactagctcaacagaaacctttggtctttcttaaaccatgcacgacctaagtgtcatcctgcttctaccaaacacggctgatcttggccggagatcataacaaatatcttaggtaatgaactgcataatgttataacatgaggctgaagacagtatgagttggtagtactcttaaagtattgatagttatgtctaaatcatagtttctcaaatatataaatatttttaattgaattaataatatatgtttatatacatttaaattttattattattttttcatattcgattgttattaaaatttatatataaaaaa

SEQ ID NO: 275 - DNA, 1584 bp, Nezara viridula
cttcacgaagcttacttgacttgtggaaagttatgttgggaaagattgagtttatattagattagattggaatactaccaattaggaattcttgtatttttatagacagtgaacgttgatggcaatattagcaattgacttccccatgtcattggattaagtatgagctcaaaaacaccgatatcactccttcaggagtatttagtcaaagaaggtattttaccatgttaccaattaattgattgtgaaagtggaactcatgaaccctgttttagttatgaggttaaagccaaaggccttattgctatcggcaagggtaggtcaaaaaaagaagcaaaacaagaggctgcgaagaaattgcttcttcaattgaatggagaggcaatttggaaaaaagaaataccaataatttcacctcatgtccctagtgtgaaagggaatgcgattggagcactacaagaatactgtgtacaacaccgtatttcttatcctcaatatgagtatatctcagctgatgttgatttaactccccaagtgtttgttgtgcgatgtactgttttaactcactcagctgaaggtaaggcttctacaaaacagcaagccaaacatattgccgcacaagcggtgttgtcgatgttacaaaaggttgaggagaatgttattgatatgtcatcaaacatagtcaaggaaaaaaaagaacttactgttacaacttatgacaaaacaagtgaggcttttcaaaaaacattaaatgaaagacctcttacttccacgaacacaatgaaaaatcttttggattttgctgattattttaaaaaagaaattggttctcgttcccctgcacttacttccttaaaaaatatagatgaactaatagaagcccataatgaccctgaaggtctatttagacttattatggatcaattaggctacgaatttaagtttgaatttttgaattctaaggattcaggtgattgtttgtgtagccttttagtaaagaagatgagtattaattgcatcggtgcaggaaaatctaaaaatgatgcacagaaagaagctgcaataaatgctcttaaagtattggtagtaatgtctaaatcatagttactcaaatatataaatattttcaattgaattaattatatatatatgtgtgtgtgtgttatatacatgtaaattttataattattttgttattttttcatattgaattgttattaaaatttataaaactgtgcaattgcattcactttgctcaatactttaatatttaatgcagcggttcatacactatgtaacctagaagtgttcggttgaggtggtgaggctgtaccttgcctagggtcaatgttggcattgagtcctccccaatctcaggggaacaaatgactagctcaacagaaacctttggtctttcttaaaccatgcacgacctaagtgtcatcctgcttctaccaaacacggctgatcttggccggagatcataacaaatatcttaggtaatgaactgcataatgttataacatgaggctgaagacagtatgagttggtagtactcttaaagtattgatagttatgtctaaa

SEQ ID NO: 276 - DNA, 1702 bp, Nezara viridula
cttcactaaacttgcttgacatgtttaacattttgatggaaaatattgagttcatgttcgattaaattgagattccacttctcaggaataattgtatttttataaatactgaatgtttatggtaatactagcaattgacttccctgtaacattggattaactatggacttaaaaactccaatatcactacttcaggagtatttggtcaaagaaggtattttaccctgttaccaattaattcattgtggaagtggaactcatgaaccttcttttagttatgaggtcaaagccaaaggccatattgctgtcggcaagggtaggtcaaaaaaagaagcaaaacaagaggctgcgaagaaattgcttcttcaattgaatggagaggcaatttggaaaaaagaaataccaataatttcacctcatgtccctagtgtgaaagggaatgcgattggagcactacaagaatactgtgtacaacaccgtatttcttatcctcaatatgagtatatctcagctgatgttgatttaactccccaagtgtttgttgtgcgatgtactgttttaactcactcagctgaaggtaaggcttctacaaaacagcaagccaaacatattgccgcacaagcggtgttgtcgatgttacaaaaggttgaggagaatgttattgatatgtcatcaaacatagtcaaggaaaaaaaagaacttactgttacaacttatgacaaaacaagtgaggcttttcaaaaaacattaaatgaaagacctcttacttccacgaacacaatgaaaaatcttttggattttgctgattattttaaaaaagaaattggttctcgttcccctgcacttacttccttaaaaaatatagatgaactaatagaagcccataatgaccctgaaggtctatttagacttattatggatcaattaggctacgaatttaagtttgaatttttgaattctaaggattcaggtgattgtttgtgtagccttttagtaaagaagatgagtattaattgcatcggtgcaggaaaatctaaaaatgatgcacagaaagaagctgcaataaatgctcttaaagtattggtagtaatgtctaaatcatagttactcaaatatataaatattttcaattgaattaattatatatatatgtgtgtgtgtgttatatacatgtaaattttataattattttgttattttttcatattgaattgttattaaaatttataaaactgtgcaattgcattcactttgctcaatactttaatatttaatgcagcggttcatacactatgtaacctagaagtgttcggttgaggtggtgaggctgtaccttgcctagggtcaatgttggcattgagtcctccccaatctcaggggaacaaatgactagctcaacagaaacctttggtctttcttaaaccatgcacgacctaagtgtcatcctgcttctaccaaacacggctgatcttggccggagatcataacaaatatcttaggtaatgaactgcataatgttataacatgaggctgaagacagtatgagttggtagtactcttaaagtattgatagttatgtctaaatcatagtttctcaaatatataaatatttttaattgaattaataatatatgtttatatacatttaaattttattattattttttcatattcgattgttattaaaatttatatataaaaa

SEQ ID NO: 277 - DNA, 1604 bp, Nezara viridula
tttgataacagctatcttcacgaagcttacttgacttgtggaaagttatgttgggaaagattgagtttatattagattagattggaatactaccaattaggaattcttgtatttttatagacagtgaacgttgatggcaatattagcaattgacttccccatgtcattggattaagtatgagctcaaaaacaccgatatcactccttcaggagtatttagtcaaagaaggtattttaccatgttaccaattaattgattgtgaaagtggaactcatgaaccctgttttagttatgaggttaaagccaaaggccttattgctatcggcaagggtaggtcaaaaaaagaagcaaaacaagaggctgcgaaaatattgcttcttcaattgaatggagaggcaatttggaaaaaagaaataccaataatttcacctcatgtccctagtgtgaaagggaatgcaattggagcacttcaagaatattgtgtacaacacagtatttcttatcctcagtatgagtatgtctctgatgaaggtgatttaactgcccatgtgtttgttgaacggtgtactgttttgacatactcagcggaaggtaaagcttctactaagcagcaagccaaacatcttgctgcacaagcggtgttgtcgatgttacaagaggttgaggagaaagttattgatatgtcatcaaacatagtcaaggagaaaaaagaacttactgttaaagcttatgataaaacaagggaggcttttcaaaaaacattaaatgaaagaccagatagacttctttcttccactaacacaatgaaaaatattttgaattttgctgattattttaaaaaagaaattggttctcgttcctctgcacttacttccttgaaaaatatagatgaaggactaatagaagcccatgaagaccctgaaggtctatttagacttattatggatgaattaggttacgaatttaagtttgaatttttgaattctaaggattcaggtgattgtttgtgtagccttttagtaaagaagatgagtattaattgcatcggtgcaggaaaatctaaaaatgatgcacagaaagaagctgcaataaatgctcttaaagtattggtagtaatgtctaaatcatagttactcaaatatataaatattttcaattggattaataatatgtgtttgtattcaattaaattttataattattttgttattttttcatattgaattgttattaaaatttataaaactgtgcaattgcattcactttgctcaatactttaatatttaatgcagcggttcatacactatgtaacctagaagtgttcggttgaggtggtgaggctgtaccttgcctagggtcaatgttggcattgagtcctccccaatctcaggggaacaaatgactagctcaacagaaacctttggtctttcttaaaccatgcacgacctaagtgtcatcctgcttctaccaaacacggctgatcttggccggagatcataacaaatatcttaggtaatgaactgcataatgttataacatgaggctgaagacagtatgagttggtagtactcttaaagtattgatagttatgtctaaatcatag

SEQ ID NO: 278 - DNA, 1716 bp, Nezara viridula
gctatcttcacgaagcttacttgacttgtggaaagttatgttgggaaagattgagtttatattagattagattggaatactaccaattaggaattcttgtatttttatagacagtgaacgttgatggcaatattagcaattgacttccccatgtcattggattaagtatgagctcaaaaacaccgatatcactccttcaggagtatttagtcaaagaaggtattttaccatgttaccaattaattgattgtgaaagtggaactcatgaaccctgttttagttatgaggttaaagccaaaggccttattgctatcggcaagggtaggtcaaaaaaagaagcaaaacaagaggctgcgaaaatattgcttcttcaattgaatggagaggcaattcagaaagaagaaataccaataatttcacctcatgtccctagtgtgaaagggaatgcgattggagcacttcaagaatattgtgtacaacacagtatctcttatcctcagtatgagtatgtctctgatgaaggtgatttaactgcccatgtgtttgttgaacggtgtactgttttgacatactcagcggaaggtaaagcttctactaagcagcaagccaaacatcttgctgcacaagcggtgttgtcgatgttacaagaggttgaggagaaagttattgatatgtcatcaaacatagtcaaggagaaaaaagaacttactgttaaagcttatgataaaacaagagaggcttttcaaaaaacattaaatgaaagaccagatagacttctttcttccactaacacaatgaaaaatattttgaattttgctgattattttaaaaaagaaattggttctcgttcctctgcacttacttccttgaaaaatatagatgaaggactaatagaagcccatgaagaccctgaaggtctatttagacttattatggatgaattaggttacgaatttaagtttgaatttttgaattctaagcattcaggtgcttgtttatgtaaccttttagtaaagaaaatgaatataaattgcattggtgcagcgaaatgtaaaagtgatgcccagaaaaaagctgtaataaatactcttaaagtattgatagtaatgtctaaatcatagttactcaaatatataaatattttcaattggattaataatatgtgtttgtattcaattaaattttataattattttgttatttttttatgttcaattgttatcaatttataaaactatgctgctgctcttttttctcaatactataatatttaacacatgggttcatactctatgtagcctactaatagttcagaattggcactcggcaaggtagtaggtttttgatattttattcttaattttgttattaaaaacaaaataaattttctatttaattaaagttaacttccttctattccacctaaattaaagagcattaggtggcgttattatatatcaatcatatcaattgatttaaaaatgtatatatttaaattattttgttatttttacatgttgaattgttgtttttaaattctagtttttaagattattgtttatgtaacattttagtaaaggaaatttgtataacttgcaccggtgcaggaaaatgtaaaaatgatatccagacaaaactgcaataagtactcttaaagtattgatgtctaaatcatagttaaatgaaatgaatgaaaacatgtttattatcataaag

SEQ ID NO: 279 - DNA, 1144 bp, Nezara viridula
gttcgattgttttttttctgatatagaggattaatctatactttttatgtaagataatttacatattaactgatcaaagaaaccaactagtagttctttctatttcgaatgtcagctggattgagaaatcgtatttgtaacctgtttcgaagaaggtagaaatcggtaagcatctttaactcaatttacaaatatcaatttaattatggaagatgcaaattatgttagagttttggaacaatatctgaagagtataaacttaaatggaacctaccaattgcttcctgaagacaagagtgccccagatcgctctatacgttatcagttgaaagtaaatgaaaaaactgtaataggggtagggaggacaaaaaagaaggcaaaggaggatgcagcagaaactatgtataatctgatgattgatgaagaaaaaatgatagctcaataccaaagtgaagaagaaaaaacacaagaccctgttgatactttagttgagatttgttccaaatttaatcttggtacaccaaaatttgaatgtgaaagtaacgcatcttcatctcatggtcccatgtataatgttagttgcactgttttgggactcacagaagaggtgaaaggattcaggaaggaccgggcaaaaaaacaagcagctaatagaatgttattgaaactgaaagagcaggaaaaggctcatgatagctattttaggttaatagaaaaagaaacaaaaaaaaatttttcattcctatcacctgatgggactgtaaatcaagaggaaaaggaaaaatttattactaatgtttggaaacggcaatttcttgaaaacataaaaaaatcaaagactgcaaatgagatgaggaagaaagatgattcttatatagaagaagttgaagatccagaaggcttgtttaacagaattatgaaagaaatgaatattaattatgaaattacttttcatttagaagacaaagaatggaattgttgcattgaaattttgccactttattttaaaatgaatgtgaaagataaggataagaaagtagctggaaagtgtgcggtcagaagagtattaaaatatatgcattccgtttaactttctcatttatcaagttcaagggaattggtacattacttttgttacaatttt

SEQ ID NO: 280 - DNA, 1536 bp, Nezara viridula
gggcaacgctggctataatgttggaaggttatgttacagtagtgtacttcacttcagatgtaaacataagttccacgaatgatccccttgtaaacaaaggcaaagcaagcataatatattaaaagaattcaagaacgcaaaataacatgatagatagcaaaaattcaagcaaaattaacaaaagaaaacaaagaaccacaccgtacagtatttaattgcaatggatggaaagacacctgtcacgctactccatgagtatttaatgaaaggaggcgaagttcctgattacaagttggtgtataatggagtaggaactcatgatcctttgttccaatatgaagttagtgccaaaggtatggtggctatagggaagggaaaatccaaaaaagaagctaaacatgatgctgctcgctgtctactacttaagttgaaggatgataatgctttggaacaggaggtagctgttgtttcaccttatgaacattctcttaaagaaaatgcagttggccaacttcaagatttttgtacactacacaacactgcttcaccaagttatgaattaattagagatgaaggtttagcacatgctaaagtttttggtatacggtgtagagtttcttccttttttactgaagctgaagctcggactaagaaacaagccaagcaacaagcttcacacttaatgttattaaagctagaaaaatgtcttagtgagggagacttcattgcaacgccagattcagaaaaaccagaaaacaatgatttaattaataaggcctgtgatgttaccaaggaagcttataataaagttttattagaaaggactaatgataagatttcctcttgtagactaggtacttctatgagtaatttttcaggtcagtttttagaaaatgttttacctttatctgaaactctcagaaccatcgctgataaagatgattctttctttgaaagctaccaagacccagaagaattgcttaccactattttgacccaattggattaccatcacagttacgaatttgttcagactaggaccgaaacagaatttttgtgtttcctacagattaaagagttaaactgtgccaattttgtggggttttcgacatcttcaaatgtagctagaaaaagtgcaactgtaaaagctcttcaatttttatcatgtatgtcaaaaatatgaaatttcatttactttaaaaatggaaaggtattttgatttctcttcttttacaaattttattattttttttcttggtaatatgattcatagtaatatggattttccttataaattaatattaattgtaattaattaaatgttaattagagttttgccttgtatgtttaacattcagttagtcaatgtaacgcgagtatgatcaaatgtgatatttgtatcatgatctatgatgatatgtgatacttgtaattattttattgttcacagtttattttaattttgttttgctgttatattaaaaaaacttatctctcaggtttttgagaaagtgttttattatcagcattatgtat

SEQ ID NO: 281 - DNA, 1008 bp, Nezara viridula
gttggtgaatggattataactttctagaaacgtaaaaccgtaaagtttgagaggtttttaaaattgtattttctaatttgatcttaagatacagaactagaattgcaacagctgtttctgtttattccactcccgctaaaacctcttctattactaaaagagattgataaacttgtgataagtataccggtctctcaacaaccaaaatgacaactagctctgaggatatgctgagcctttttgaaaaatttcaaaaatacgtggaagaggagcaggcacggcgtgaagtaatacaagagtcagctcgtgaattagagcagcatattagacaaatgatgacaattcttcaaggaattcatcaagatactggaatcaaagacagtccaaaagtgattaaccgagcaaaggaactggttggtcccagcagcaaagtttaccagaaattgagttcaggaatccctcctaaggagtattataaataccatgaaatttggcgaggcattactcaaaaagcagtgttttgtattgcattaattgaattccttctgtcagggaaacttgcatctagagaacaggttgcagctgaactctctttaaaaatcgaccagtcagaaggatttcacctcgatttggaagattacttgcatgggctacttcagttggtttcagagctgtctagattagcagtaaatagtgctgcttgtggagattatcaacgccctgttgctatatcacagtttgtcaacgaactgaatgcaggatttcgtttacttaatttcaaaaatgattccctcagaaaacattatgactgttttaaatatgatttgaaaaaaatagaagaggtggtatatgatctttctatcagaggactgaagtcttctgaaaccaaatcaaatgttgatgcctcacatacatctaatatctcagacgattctcagatggcttcttagatttccagtaaaggaaatatgttgccaaatttcatatttctactaagaaattttgtcg

SEQ ID NO: 282 - DNA, 1714 bp, Nezara viridula
atctatggtagccttaacttcaggcaacgaaaattaatatatcttgattttactacattagcaatatgaatacattttttgacgcttaatcggataaataaaaataaatatggataagattatttgatacgttacaatacgtcaattactatatataactccgttataaggcagtaacaaaactaaacaaaagaaccaacaaaacaattgatttcgcgttatttgttgcctgtttgtttcctgaaacgtgttgacgcttggttttcgctgtttttgttttttttttataattttttgtctcttttttcttctttggttttgtcctgctgcttagtatcgttatgtatcgtttttttcatatgggttatgaggagaaaaaaagaaaataccagaaaccacctcaggagaaaaaagctctccaatatgataaaactccagttactgaagcatttgaaaaatatgcaatggaattgaattcaaagcaagataaatccgaaagaattgtaaaacttagcagagatgtaactattgcaagtaaacgtgccatattttctcttcatgctttaatgagatcaggtaattatgaagaagatttagcaaaaattactgaaactttggaaacagtaagagaaagtcttctaaaaaatatagcatttgaactcgctggtgatgacccctatcagttttgcaggaattatactgcaggtcttcaagagtatattgaagctgttacattttaccatttcataactaaaggtggactatttaacattgatgtaattcaaaatgaattaacatttgaaaaaaaagttatggatcaaggggagccacctcaagagaaagtaccacttcttgtatctttctttgactatattctcggcgtacaggacctcactggtgaagtaatgaggcattgcattaatagctttagcgctcgtaatttagaagcaggaaacaaagattgtaatttcgtcaaaagtctctatacaggaatgctattgttgaattcatacagaaatatgcatggaatgcaagggagagatttcatgaaaaaaatgtctgttacccttcaatcattaaaaaaaatggaaatggcttgctatgctgcacatattcggggatcagaagccctcgactttggatttaatacagaagaatttgaaagttataattttggagattagtctgtaatatacgattacaactattttttaattattgttaaggcaatgtggtctattattttgtatttaatcattttttttatttttgtatatatactctcttgctggtttttattgattggtttattttctaggtattgctttgtaaatattttgttttatctaactcatacaagaaaaaagaaagttcttattttgaaattcaaaccattcattttatttactttgatcatgatataattaactcaaaaatatagaagttttggttaatgaaaataaaaatgtgtgtatggaacaaaaccgtcagtatcttggttgatgatttgttaagatttatgttttgttgtctcatgcaatttcatttgtactatgcaaaaaataactaacatacaatctccattttcctttttatactgttcttgaaataccactctaaaataattttatttttaagttttgatgaaccaatcctcaactcttaactcaattttttccagtttgatccagataaaacagcaatttgattcctt

SEQ ID NO: 283 - DNA, 5261 bp, Nezara viridula
attttctagttcacaattcagtctaggttgcagccacatcatcaccacctttcgccccttggcacgtttgaagtcagtccaatgaggtgttcgttaatatgaaaacgtgttgtttgttctacatttttgattctgaacgatccattttataaaaagaattagacagcaaatttaagcgaaaataggacatcttcgtttacaatttttgtgaaatctttccaataatcaattacaatgagtgctccccaacaaccacaaactgaacaacaacctcccactttaaataggggaattgtaaaacaagttttatctggagatacggtagtcatcagaggggttcccaaaggtggacctcctcctgaaaaaactttgagtttaacatctttgattgctcccaaacttgctaaaagacctcaagctcctggcccaaaccctgatgaagatgaaccttatgcttgggaagccagagaattcttgaggaaaaaactgattggacagtatgtcctctttacgacacctaaagagaaagctgccaatcaaaccagagactatgggaccctgtatttcgatcctccaagtggacccagagaaaatataaatgaattattagtgaaagaaggcctagttactgtcaggaccattgctggaagtaaagatcctgttctccaacatttaacagaattacaggagcaagcaaaagcagccaaaaaaggaaaatgggctgatgacgcaagcagccatgtgagacagataaaatggtcagtggaatcagataaaatgatgaactttgtcgacaaggcagaagggaaaccgttaaaagccattattgagcatgtcagagatggatctactgtgagagcatttttattgccggacttcacttatgtcactttaatgatgtctggaatcaggtgtcctggtttcaaacttgatagtgatggcaaacctgatcttaatatcaaagttgactatgctgatgaagcaaagtattttactgaaacaagattgcttcatcaagatgttgaaatagttttggactcagttaacaacaataactttgttgggacgatcatacatcctaaaggcagtattgcagaagaattacttaaagtaggctatgctcactgcgttgattggtcaatatctaagatgaaaaaagcagatgctgataaactgcgtcaagctgaaaaaatggcgaaagaaaaacgactcaggatttggaaggattggactcctcctcctgtgattagtgaccgtgaattttctggtacagtaatagaggttgtgaacggtgatgctcttatggtgaaacttcccaatggaactgtgaaaaagatatttttagccagtattagacctcctagagaaacgaacgttgctcccgaggagagaagtgcagaaagaccacgtggaggaagagttcgcccgctatatgacatcccatggatgtttgaagcaagagaattcctgaggaagaagctcattgggaaaaaagtgaatgtgactgtggattatatccagcccgcaagagacactctccccgaaaaaatatgttgtactgtaaccatttctagtgtaaatgttgctgaagcaatggtcagtaaaggactcgctacagttgtgcgttacagacaaaacgatgatcaaagagcttcagcatatgatgcacttcttgctgccgaaaacaaagcagctaagagtttgaaaggtgttcatgccaaaaaggacatacctgtacatagggttaatgatattacttccgatccttccaaggctaaaaatttactcccgcatatatcgaggtattcacggatcgaagctttagtagagtttgtggttaatggttcgaggatgaggttgtatgttccgaaggattctcatctcattacgtttcttttatcaggaattgaagttcgatgtgataaaaatgctgcagttaatactgaagaggctgcattacaattcaccagggaaaggtgtatgcaaagagaggttgaaattcaagttgaaggtattgacagaaatgggaatttcattggttggttgtgggttgataatgttaatttgtcagttgctctggtagaagctggtctcgccaggatacactcatctggtgaaaactcaagatatgctaaggatctttacaatgcaaaaaatacagccaaggcaaatggagtttggaaatatgaagaaaaggaagaaaaacctgacactatagaagaagacaaaaccgttgacagaaaaactgactataaagaggtgtatgttgttgaagtttctgaaattggattctatgtccaatatgattcaatgggaagtaaattaaactcacttcaagcaaaaatggctcaagaaatgggagctaatcctcctctacctggagcttattctcctaaaaaaggtgacctttgtgctgccaagtatccattagataacatgtggtaccgagcaaaggtggaaaaagtgactggctcagggaaggctagcgtcttttacatcgattacggcaacagggcagaagtgcagacgacacaatgtgcaccacttcctcctggtcttgatattaacacagacaagccttatgcccatcattacactctggccttcgtctctcttcctaatgagcccgaggataaaaaagcagcagaaaatgagtttaggttatgtgtcttagacagaaatctcttgatgaattatgaatatgaacaaaatggaattagacacgtgacattattggacccagaaatggacaaagataaagacaaacaggacattggaaaatcattggtcgcagatggattcttacttgtttctaaacgcagggaaagaagatttgaaaagcttatgagtgattatctggcggctgaggatgaagccaaaaagaaacatttaggaatttggcagtatggtgacataagagatgacgacgatagagaatttggaatgggtcgctaaacatgtgtatataataggataaaaaaatatttcaacagaacacattcccttccaaaaaatgaggaatcctctttcattataatttttaacgggaaacagtgttgttagaaatgataacatcaatatttcttcagagaagaaaataaagaaatgaaggaactgagtttgtccagtggtaaatccgtctttgaagagaatttattcctaataaataaatgaaactcaattgcctttcagtcttgactgatctatgtttcttaaaaagacattaacagttataagcttagataaaaacagaaccggtacataattatatatgtatatctagattactattcaagaaccaaatgacttccaaacttaattctaagcatgttgggtaaattcatagagactgatattatttaaatatgaattctttattttcattttgataaagagcagcatgcatacattatgcaatgctcagctaatccaattaatgcagtgtaaaatttgttattcggttaaattataatgcggagtgtggttgtgttgatagaataaatattgttggaaaagataatttattattattcacacatgtataaaaatttataaagtaattcctatactttaatttgtataactttctttggatttcccacaggaaacattccaaacataattgtatattacagtatgctatataagtcatgaatcaaataatactatgaggccttgaattatatatataaatatttttacatttcttatttaaggttttataaactacacttatttacattaacatgtccttctctgccaatgaaggaactatatgtgaaaatattcgcttatcaaatccacatgaatagagcttgttgtttactggattccatgacaaatctcttacaaatcctctatgctcgatatctgtatacactaactccaaggtgttcacatcccaaacttttattacattagagtttccacatactgccagaagtccttgatcacagttgatagaaactctgtgaactggatgtttatcaaactgaagcctgttgatttcttttctgtttcggatatcaaaatatataacctctccagctatagatccagcaactacagtattatcatctttccatgctatagatgttaacccaaattcatgatgtgaaatggcagaagctggtttagactgttttaaatcccatagtaaagctgatccatccaaactgcaagatgaaaatatagcaccttcttcaggggatgaacaaacacaggttatttccatagaatgggctggtgaatacttgtgctggatttctaagctgttattgtcccaaacgttaatccttaaaaacaaaaatttatacgtatacctacttttaattttccaatttatgtaaataattattccatgcaactttctggttgttgcaacttgtgttccaaaggtacatagttataaaaagagaattgaaatgataatttttttggctactacttccaagcgttgcttcaccatggagccagatcttatgataacagtgttgatggaagtccaaaagtggcaagcatatccgaaagtacaagagccaaatactctggtaaggccccgatctcaactgaaaaggacacgtgggggttgttttcatatcactgcctgctgaaactgagtatagcttatccttaagaacagcaatggaagttatacaaccatcatgctgcgtttcaccatgttgtggtaaaaagtgagtcgtatcatcctcaaatttagcaattgaacatattgtcactttgccagaatcttctccaaagataattttatcccaattatccagaaattttccagtggcaacacatgattcacaaccatggccactaagactttctttctccaaaggtgtaacatctcctgagtcaaaaaaccatacactaccactccaaatttttccgactaaatttgaggagcccagcagaagatgtccctcttttgagaaatcaataaattcaagatgtggttcaatggtgaatggaacaacagtaaaactaaatggttttttggaatttgattgatcttctagctgagcatgatcaccttcctctaaattcatacattcagtattttccattttaaaaaggtttttacagtaaaaatgtatacaagttaaaaacagggtacagaaagttaaaattaggtaatctcccgaagcttcaaatgaaagaataacaaattagtttaaaaatacaacgcgaaaccaaatgtacagtgccccaagagactttttaaatcctgagcgttcaacactaagtataaa

SEQ ID NO: 284 - DNA, 926 bp, Nezara viridula
gtaaaattatacgccataaataattattattaccaatacagtaaactaatcgatcttccaaaatttcaaattattttgttgggtctgtaatttttcttgttcttcctaatgaatatttttatttgtcataaatgcttactaatggaaggagtacttacagtggtgtgaaacatgtagacaagagagaaggtgctggcgcacacaactggggaaatctccgagatgatattgttgatattcaaaatactcccgtgtctgatgaagctacatggactgttgaaaaaacagaagaacctgtggttgaaaccaatggaaccgtagttgaaactgaagaagttgttcaaaatattgctgaagaagagctgaaggaattgaccttagatgaatggaaggcattgaaagctccaagacaaaaacctacatacaatattagaaaggctggtgaaggagaagaccctactcaatggaaaaaaatgtatgcattgcagaaaaagaaggatggtgaagaagatgaagaggatgacgagtttgaatatgaaagttttgattacccccaaagagttggacgtcaaaagcatgttttggatattgacatacattttaaagatactcggggtggaggtagaggtcgtggaggtagaggaatgggtcgtggaggtccccgcatgggtttaagaggaacaaatgggccacctgctgaaaaagttcatattgctcgtgatcctgttattccaaaaattgctccaaaagttgatgatgaacatgattttccttctctgggttaaatgactagtcttgaatcaataattgttaaattcaattaaaactccttctgaatttagactgacatttatttatagggaaaaaaaaaaaaataataacctttcctatttccatttcaggaatctaggttacttattactaat

SEQ ID NO: 285 - DNA, 2973 bp, Nezara viridula
gaaggtttcaaattactgctaacttgcaaagagctctgtcctgtagagtgtgccgtcgtttgtgcttttctcctaacattaatgacatatcgttttgaatgtaatttgggttgtcattaacggtatattattattacaacataaactgatttattaaactatataatggagggtagacgccttgggaggggtgaagctttaaggaagcttctcgaatcccaacctcagcctttgcctcacgctcagtcctttcctcgctctcaacctgagccatcatctcatcggccatcgtcttcattttcacaatcgtctcaagaaagagatccatattcttatggacaggatgtgtcagctcatacatcagaaactgaagcaccaagaagaccaatggggagaagtgcattgctagccggtgagttgaggagaagtgaagatttaaaggaggaagtgggtgctgctccgaaaccttctggaagagggagagctttgttagcttccttagctgcgagggaggcgagtagtccttcagtcgaacaaatttctcgacatttgtctaaaacttcattggccgagtctaccagtgaagcagaaaaggaacctgttgttatgaaggggacatatggaagggaaatacctgtaggagtaaactatgtcaaactcaaagtagaaaagggtaaaggtctctttcagtacgatgttcaatatgatccccctgtagaatcgaggagtctcaaattcgggatattgaatagtgtcaagaatgtcataggagagactaagctctttgacggaatggttctttatcttccatttaagttacctcagaaagttaccttggtaaaaacaactgtatcacatgataatagcgttgttacagttaaaattacatttacgaaagaaagaaaatttggtgatccggaagcgatacacctctacaacgttctgtttagaagaattatggttattttaggcttagcgcttcatggaaaaaatttttatgatccaaaatctgcaatgcctattccattgcataagctggaggtatggccaggctatatcactgccattgatgaatatgaaggaggcataatgttgtgctgtgatgcttcgcacagagttctgagaaatcagactgtacttcaattaatggatgatcttcaaaattccaatcataaacactggaaagacgaatttgtgcaattgatactaggtcagtctgtacttacaaagtataacaacaaggtttacagaattgatgatgtggcttttgatgaatctccaaatgactgtttcgaaaaacataatggtgaaaaaattaaatatgtcgactattacagacttcagtataatgtaaaaattactgattgcaatcaaccactcctcaaaagcagagttaaaacacggattaaaggaagagaagaaagacaattagtttctctgatccctgagctctgtttcctgacgggaataacagataatatgagggctgatgccagggttatgaaagatataacgcagtgcatcagtatttcacctaaccaaaggcattatgccataaaccaattcatcaataatattaaagcttctcccgaagcaaccaaagttctctctgtctggggtatctcgctggacgatgcttatatggttcttcagggtcgcaatataccccccgtcgacataatatttggtggcggagttacagttcctggtagccgagaggcaaactggtctggtgcttccaataaaaacagagccatttcagttgttaatttttcctcatggtcggtggtctgtaccagaagagacatggatatggtaacgtcatttgttgaacagatgatgaaagtaggacctcagatgggtattaaaatcatgaagccaaaaatcattcccatcccagacgataggaccgacaattacatcagaactttaaggtcgacgattaaggaaaacatacagattgttgttattatatttccattggccagaactgacaagtacagtgctgttaaaaaactatgttgcattgaagaacctgttccttctcaggtaattctgtcaagaacggtcagaagagcaggaacttctaaagctattactttgaaagttgctctgcagatgaattgtaaacttggtggtacattatgggcagtcaaagtacctttgcaatatacaatggtctgcggactggatacctatcacgaccccaaaaagagagcaaacagcgtcggagctctagtctgctcgttgaaccagccactgacgcgttggtattcaaaaatttacagtcaggctgcaggtctagaatttgttgagggcctgcaagtcagtatgatttcctccttgcagaagtatagagaggttaacggaaattatcctgagcaaatcacaatatttagggatggagtatccgatggccaattgcgtctttgtgaagaatacgagctgcctcaaataatgaatgcatgtaggagaatttctcccgattacacaccgaaagttctctttgtcgtcgtgcagaagaggataaatacaaggctcttcggtgttgaacgtggtgacagaagtttttccaatccattgccaggaactattatggatcacactatcacccgtcgttacctccatgatttcttcttggtatctcagcatgttaatcagggaactgtttctccgacacactacatcgttgtaaggaatacgacaagtatgtctcctgaatacgacaagtatgtctcctgatcaaattcagaggttcacgtatatgttgactcatctgtattacaactggccaggaacaatcagagtccccgctccatgtcagtatgctcacagacttgcttatctaatcggtgaaaatattcacaaagaagcatcagaatccctgtcagacaaactgttttatttgtaaatttatgtataaaaccttatttacatatacatgtgtatataactcaaaatgttattttctac

SEQ ID NO: 286 - DNA, 3144 bp, Nezara viridula
tccctcctcacttgtgcagaagcttgggacttcacgtcggtattcgtttgtttacctttaaggttgaaggttcttcgtgttgtggttcgcttttcttgattctatagtctggttaacaacatttgatccagcgagaacaaacttgaatcaggatgtctgaagggcagcaaccacctaagggtcgggccagggggagggctatgggtagagcccgtgcccgtggagttcctacagcttcacagcagcctcaacagcaacctgctttacctcaacaacctcagcagaccccaccatctcaatatcagctacctagcccatcttctcagcgacttcctattcttcctcagccacagcagcaagctagaagtcctggtagtgcctggggttatgttcctcaacaaatgcaacctggtactagtggtgttcaacagataagacagcagcaagtgcagcagcaaggagagcgacggccacaagagcagggggcatgcgccatagaccctaacctgaaagatgtagctggaacctttaaaaagctgtctgtttctgaacccaaggataaacgtgttgcacgtaaaggaattttgagaggaaaaatttcagccgaacaaaacctagaacagaaaacaaggcctgaaactttatatgttaaaaaaggtactagtggaaaaccgattaatctaataactaaccacttcagattgaccaaaacaactgattggtctttatatcaatatcatgtcgattttgagcctgaggaagaaaggactagagtccgtaaagccctaatggcaaatcaaaaggaaacactaggagaggcttatttatttgatggtacaatgttatttgtcattcagaggctacataccccacagaacaacgtaatagaattattttcttttagaaatgatgatcaaaaaatgaggattattattaaatttactaatgagcttttatttggagattatcaatatatccaaatatttaatattatgcttcgcaactgcttagatgacatgggattacagcttgtagggcgtgaatatttcaaacctgattcggctgaaactctgtcacatcacaaacttgaaatttggcctggctatagtacttcaattctgcaatttgaagaccacattatgatgggtctggatgtttctcataaagtcttaaggactgatagtgttctggaatttcttcaagaatgtcgtcgaagatatggttctgaatgggagcattacttcttggacaccattctaggagctgtagtttttacaggctacaataataaaccttatcgagttgatgatgttgattttaaacaaacaccaactgacacatttgtgaaaggaaatgttagcataagatacgtagattactataaagataaatataataagaaaataactgacttgaaacagcctttgcttgtatcaagacccaaagcgagagacattagggctggaaggactcaaaatcttattctaattcctgaattttgccaaatgactggtcttggtgatgagatgaggaataatttcaacttgatgagggcagttgcagaatgtacccgtgtaccacctaacaaacgtattaaagattattataagtttcttaaaggcataaatggatgttcaaaggctgttgatagacttgattcgtggaatgtccaatttgctccaacattggaatctgtcccttcacgaattttcgatcctgaggctttgcatacagctgatgctaatgaccttataaagccgcaagatggagattggtctcgtgctctgcgtacatgtggcatgttcgcgactgtcaagttggaaacctgggtattagttgctacaaaacaggcaacttatgataagagggtgaacggtaacgccattgataattttctaaatgaactcacgagagcaggcaagagtttaaaatttgaagtgagcagacctgaagtggttattattcaagttgacaagatagccaactatctaaccgtaattgacaaagctgtaaataaaggaaatgtccagcttgttatgtgtattataaatgcaagtaggactgacttgtatgctgccattaaaaaaaaatgtctctgcgataggtcaatggcttctcaggtgatagcaactaaaacattagggcataaaagtctgctctcagtttgctcaaaaattgctattcagttgaactgtaaactgggtgggagtccatggtacactcctctcccatttaaagatgacttgaaaatgaaagatggtactgtaaaaaaggaaacagcacatgcctgtatggtagttgggtttgatgtatgtcacgatacaagagtgaagggtaaatcagtgggtgcaatggtagcctcccttaattataatttctcaaaattttactcagcagtcagtcggcacagcctaggagaggagttgtctaatgacattgctaaccatgtatctcatgcagtcctaaagtttgaagaactcaaccaatatttacccccaaaaataatcatgtttagagatggggttggtgaatcaaatattggatatgttatcgaccatgaggttatgacaataaagaatcgactccttcaaatgtttcctcaaagaccaccaaagttgactgttattatcgtatcaaaacgtattcagacaaggttttttctccaggatggtgtagataaacaaggttcaccatactatgtaaaccctcctcccgggacaatcgttgatgacgtggtcacccgacctgagaagtttgattttttcttggtatcacaatcagtgcgtcaaggtactgtgactcctacaaactacaatgttatctttgatgaaaataaactgaggcctgatcatgttcagaggatggcgtacaaaatgtgccacttgtattataattgcactgctacggtgagggttccatgccaggtccaatatgcccacaagctcgcatttttagttggccaggtgctccacattcctccaaattctgggctcagtcatcttttatatttcctttaagaatttttatttatttctcagtctgttgggaagaattttgtgtaacatttgtaaagcaatatttttttttatttaaattttattttcttataatcaaacgatgggagtgtttttatttttaaaaaat

SEQ ID NO: 287 - DNA, 3225 bp, Nezara viridula
tttttccctcctcacttgtgcagaagcttgggacttcacgtcggtattcgtttgtttacctttaaggttgaaggttcttcgtgttgtggttcgcttttcttgattctatagtctggttaacaacatttgatccagcgagaacaaacttgaatcaggatgtctgaagggcagcaaccacctaagggtcgggccagggggagggctatgggtagagcccgtgcccgtggagttcctacagcttcacagcagcctcaacagcaacctacttcacctcaacagaccacaccatctcaatatcagctacctagcccatcttctcagcgacttcctattcttcctcagccacagcagcaagctagaagtcctggtagtgcctggggttatgttcctcaacaaatgcaacctggtactagtggtgttcaacagataagacagcagcaagtgcagcagcaaggagagcgacggccacaagagcagggggcatgcgccatagaccctaacctgaaagatgtagctggaacctttaaaaagctgtctgtttctgaacccaaggataaacgtgttgcacgtaaaggaattttgagaggaaaaatttcagccgaacaaaacctagaacagaaaacaaggcctgaaactttatatgttaaaaaaggtactagtggaaaaccgattaatctaataactaaccacttcagattgaccaaaacaactgattggtctttatatcaatatcatgtggatatgaatcccaatgaagagaaaacatgggttcgtaaaggtctattagcggttcatagggaagcgctaggaaatgcttatttatttgatggaacaatgctgtttgtccgtaataggctgcatagcccacagaatactgaattaacatttttttctcctagatcgaaagatcaaacaaaaattgccataactgtaaaatttactaatgagctacgaattggagattatcaatatattcaattattcaatattatgcttcgcaacagcctaggcgacatgggtttaaagcttgtagggcgtcaatattttaaccttgacgagtcggaagaactgccagaagcaaaaattaagattttccctggctttaatacttcaattcttcaatatgaagaccacattatgatgtgcctggatgtttctcataaagtcttaaggactgatagtgttctggaatttcttcaagaatgtcgtcgaagatatggttctgaatgggagcattacttcttggacaccattctaggagctgtagtttttacaggctacaataataaaccttatcgagttgatgatgttgattttaaacaaacaccaactgacacatttgtgaaaggaaatgttagcataagatacgtagattactataaagataaatataataagaaaataactgacttgaaacagcctttgcttgtatcaagacccaaagcgagagacattagggctggaaggactcaaaatcttattctaattcctgaattttgccaaatgactggtcttggtgatgagatgaggaataatttcaacttgatgagggcagttgcagaatgtacccgtgtaccacctaacaaacgtattaaagattattataagtttcttaaaggcataaatggatgttcaaaggctgttgatagacttgattcgtggaatgtccaatttgctccaacattggaatctgtcccttcacgaattttcgatcctgaggctttgcatacagctgatgctaatgaccttataaagccgcaagatggagattggtctcgtgctctgcgtacatgtggcatgttcgcgactgtcaagttggaaacctgggtattagttgctacaaaacaggcaacttatgataagagggtgaacggtaacgccattgataattttctaaatgaactcacgagagcaggcaagagtttaaaatttgaagtgagcagacctgaagtggttattattcaagttgacaagatagccaactatctaaccgtaattgacaaagctgtaaataaaggaaatgtccagcttgttatgtgtattataaatgcaagtaggactgacttgtatgctgccattaaaaaaaaatgtctctgcgataggtcaatggcttctcaggtgatagcaactaaaacattagggcataaaagtctgctctcagtttgctcaaaaattgctattcagttgaactgtaaactgggtgggagtccatggtacactcctctcccatttaaagatgacttgaaaatgaaagatggtactgtaaaaaaggaaacagcacatgcctgtatggtagttgggtttgatgtatgtcacgatacaagagcaaagaataaatcggtgggtgccatggtagcctcccttgattattatttctcaaaattttactctgccatcagtaggcacacttcaggacaggagttgtcagatgacattgcactccatatatatcatgcagtcatagaatttaataaaatcaacagctatttacccccaaaaataatcttgtttagagatggggttggtgaatcaaatattggatatgttatcgagcatgaggttaaggcaatagagaaacgacttaaaacaagctttcctcaaaaaacgccaatgttgactgttattattgtatcaaaacgtatccagacaaggttattcagagaattaacgaaaaaagagtttactgataaaaaagttccaatcctaaatgatggtataccaaactatactaaccctaatcctgggactgtcgtagatgatgttgtcactcgaccggataaatatgattttttcttggtatcacaatcggtgcgtcaaggtactctgacccctacaaactacaatgttattttcgatcaaaattgtctgaagcctgatattgtccagaggatagcgtacaagatgtgccacttgtattataattgcactgctacggtgagggttccatgccaggtccaatatgcccacaagctcgcatttttagttggccaggtgctccacattcctccaaattctgggctcagtcatcttttatatttcctttaagaatttttatttatttctcagtctgttgggaagaattttgtgtaacatttgtaaagcaatatttttttttatttaaattttattttcttataatcaaacgatgggagtgtttttatttttaaaaaataattgtttactttttatcatgttataggtgacctatgtattttttagtttttg

SEQ ID NO: 288 - DNA, 3246 bp, Nezara viridula
tttttccctcctcacttgtgcagaagcttgggacttcacgtcggtattcgtttgtttacctttaaggttgaaggttcttcgtgttgtggttcgcttttcttgattctatagtctggttaacaacatttgatccagcgagaacaaacttgaatcaggatgtctgaagggcagcaaccacctaagggtcgggccagggggagggctatgggtagagcccgtgcccgtggagttcctacagcttcacagcagcctcaacagcaacctacttcacctcaacagaccacaccatctcaatatcagctacctagcccatcttctcagcgacttcctattcttcctcagccacagcagcaagctagaagtcctggtagtgcctggggttatgttcctcaacaaatgcaacctggtactagtggtgttcaacagataagacagcagcaagtgcagcagcaaggagagcgacggccacaagagcagggggcatgcgccatagaccctaacctgaaagatgtagctggaacctttaaaaagctgtctgtttctgaacccaaggataaacgtgttgcacgtaaaggaattttgagaggaaaaatttcagccgaacaaaacctagaacagaaaacaaggcctgaaactttatatgttaaaaaaggtactagtggaaaaccgattaatctaataactaaccacttcagattgaccaaaacaactgattggtctttatatcaatatcatgtggatatgaatcccaatgaagagaaaacatgggttcgtaaaggtctattagcggttcatagggaagcgctaggaaatgcttatttatttgatggaacaatgctgtttgtccgtaataggctgcatagcccacagaatactgaattaacatttttttctcctagatcgaaagatcaaacaaaaattgccataactgtaaaatttactaatgagctacgaattggagattatcaatatattcaattattcaatattatgcttcgcaacagcctaggcgacatgggtttaaagcttgtagggcgtcaatattttaaccttgacgagtcggaagaactgccagaagcaaaaattaagattttccctggctttaatacttcaattcttcaatatgaagaccacattatgatgtgcctggatgtttctcataaagtcttaaggactgatactgttttggaattctttaatgaatgttgtcgaagatatggcgttgatgaaggaacagagaaattcaaggacaccgtacttaaatctatagtttttacattgtataacaatagaccttatcaagttgatgggatttgttttgataaatcacctcgtgactcattttcgtacaaaggaagtactaaaacatacattgcttactatgcagaaaatcacagtaggacaataaccgactacaatcagtttttgcttttatcaaagcccaaagcgaaagacgtgaggggtggaaggattgaagatatttatttaattcctgaactttgcctaatgactggtcttagtgatgagatgaggagtaatttcaacttaatgactgcagttgcaacatgtactcgtgtaccacctaacaaacgagttagaaattattataggtttattaacaagctatatggatgtcctgaggttgttgaaagacttaatttttggaatatccaattctctcgatcgttggaatctatcccagcccgagttttaaatcccgagattttgtatatgggacgtaattccgacgaagaacctaccataactccctcggcggaggaaggagattggtttcgttctattcgttcacataaaatgttttcaagtgtgccgttgaagaaatgggtattaataacttcaaaaaacgcaactgctaatgtgaagatgaggggtgaaccaataaagaattttttaagtgttctcaaaaatgcagccgacagtttgaattataagatagattctaatcctgttttgtatattactagaggtgaaacgatagcccactatttagacgaaattcaaaaagctacgagtagaggtggtatcgatcttgttatgtgccttataaatgtaaatagggctgacttgtatgctgccattaaaaaaagatgttgctgcgatagtccaataccatctcaggtgatagcaactaaaacactagggcataaaagtctgctctcaatttgcacaaaaattgttattcagatgaactgtaagctgggtgggagtccatggtatacttcactcccatttaaaagaaacgtggaaacgtctgatggtaccggaaaaactgaagtgccagctgcctctttggtagtagggtttgatgtatgtcacgatacaagagcaaagaataaatcggtgggtgccatggtagcctcccttgattattatttctcaaaattttactctgccatcagtaggcacacttcaggacaggagttgtcagatgacattgcactccatatatatcatgcagtcatagaatttaataaaatcaacagctatttacccccaaaaataatcttgtttagagatggggttggtgaatcaaatattggatatgttatcgagcatgaggttaaggcaatagagaaacgacttaaaacaagctttcctcaaaaaacgccaatgttgactgttattattgtatcaaaacgtatccagacaaggttattcagagaattaacgaaaaaagagtttactgataaaaaagttccaatcctaaatgatggtataccaaactatactaaccctaatcctgggactgtcgtagatgatgttgtcactcgaccggataaatatgattttttcttggtatcacaatcagtgcgtcaaggtactgtgactcctacaaactacaatgttatctttgatgaaaataaactgaggcctgatcatgttcagaggatggcgtacaaaatgtgccacttgtattataattgcactgctacggtgagggttccatgccaggtccaatatgcccacaagctcgcatttttagttggccaggtgctccacattcctccaaattctgggctcagtcatcttttatatttcctttaagaatttttatttatttctcagtctgttgggaagaattttgtgtaacatttgtaaagcaatatttttttttatttaaattttattttcttataatcaaacgatgggagtgtttttatttttaaaaaataattgtttactttttatcatgttataggtgacctatgtattttttagtttttg

SEQ ID NO: 289 - DNA, 983 bp, Nezara viridula
caactacgatgatattcccgtggaggcaactggtgagggcgttccggaacctatcacctcgttcacctcgccccctttagactcgctcttggtcgaaaatgttgtgctttcccgcttcaccaagcctactcccgttcaaaagtactcgattccaattgttgctggtggtcgtgacttgatggcttgtgctcagacaggttcgggtaagacaggtggttttctctttccagtcttgtccgagctgtacatgaacggcccggctcccgtggttaactctggtggtgctttctcgtcacataaggtgcacccgaccgccttggtgatggcgcctactcgtgaattggtctcgcaaatttacgatgaggcaaagaaattctcttaccgctcttgggtacaagtttgcgttgcgtacggcggtgccgacattagacagcagatgcaaactttggagcgtggctgcgatcttttggtcgccactcctggtcgtctcaaggacttgttggagcgtggccgtgtttcattggcaaacatcaagtacttggtgttagacgaggctgaccgcatgttggatatgggcttcgagccacaaattcgccacattgtccaaggatgtgacatgcccggtgtggaagatcgccaaacccttatgttttcagccaccttcccccgtgatattcaattattggcgcgcgactttttgaaggattatatctttttgtcagtgggtcgtgttggttccacgtcggagaacattacgcaaaaggtcttgtatgtcgaggatgaggacaagaaactggtactcctcgacttgttgagtgcgaacccagcgcaattgaccatgattttcaccgagactaaacgtatggccgacaacttggccgactttttgtacgaccagaactttcccgctgccgcaatccatggtgatcgcactcaatatgagcgtgaaaaagccttgctggcctttaaaagcggtgctgccc

SEQ ID NO: 290 - DNA, 1793 bp, Nezara viridula
ctcgttgctattcttttccattcggctgttcgtcgtggtcgtatttctgttaagatcacgaacctcgttagcagaacatttctccttaagaattgtaacacacctgtttattccagcataatgaaaatgggatttgattttccaactgctatccaagcccagggttggcctatcgcattgagtgggaaaaatatggttggcattgctcagactggtagcggtaaaactctagcctacattcttcctgctgtaattcacatcagaaatcaacctagagtacaacgtggagatggtcctatagctcttgtattagcacctactagggaattagctcaacaaattcaaacagtggctagtcaatttggtggtgcttgtgggcaaaagtcagttgcggtattcggaggtgctcctaaaggacctcaagccagggatttggagagaggagtagaaatagttattgccacacctgggagattaatcgattttttggcgagaggtactactaacctaaggaggtgcacctatttagttctggatgaggctgatcgcatgttagatatgggatttgaaccacaaatcaggaaaatcatgcaacaaattagacccgatcggcaggtgctcatgtggtctgcaacttggcccaaagaagtcaaagctcttgcagaagattttcttcaagattatgttcaggtgaacattggttctttagaattagccgctaatcacaatatacaccaaatagtagaagtttgtgaagaaagtgataaacaatctaaacttaacagcttacttgaagaaattggaaatgaaaaacttgaaagaactattatttttgttgaaacaaaaaagaaagtagaagctattgccaatgcccttaaaagagtagggtggccagctgtttgtattcatggtgataagtcccaaaatgagagagattacgtcctaagagattttagacgaggtaaatcattaatcctcgttgccacagatgttgctgcccgtggcttagatgttgaagatgttatgtttgtaatcaattatgatttccccaactcctctgaagattatattcatcgtataggccgcacagggcgatccaatgcctcaggcactgcctataccttttttacttctgcaaaccaaaaacaggccagggaccttgttgcggtcttaactgaagccaaacaaagcatttctcctgaattgcaagcaatgacaaggttctcaggtggtggaggtggcttttctcgaggttatagaaatggtaccttcaaaaggaatgacaagtttggtggtagtcgcttcaattctggcttccagaggaattctggtagttatcaaagaaattccaattctaatggctttggacaacagaataccaactataagagatttgactatgattagtttttctgaagaagagaattttatcacttgtgtaatttatattgtatataagagatgcagatttatgctgcagtaataattcctaatgaattaaatgtgatattttagtgttaatttttcacttgattaaaacaagagttaataagcagtgtcgttgtagactctacattaatttatgttttttatctggattatataacttataagttccaaatttttttttttttgtatgagaaattcatgatacctttgtattttatttcacatttttcttgtagtattaaactaattataacaccttatgttggagaactgttctgttaacttgaaaaaagtaaaaaggaagagtaacttactattgattaaacttttttttatgaaaaaaa

SEQ ID NO: 291 - DNA, 2282 bp, Nezara viridula
gaacagtttttaaggttatagtaatgtaaggtttcgcgctctcacgctggttttaaagtagatttttatctgaaattacatttaaaacgaattaaaaaccttttcattgtggttgatttttttttattccttatagttttaaccttatttaaaaatggtgaagatatcttgtgcattagacgttagctcagcacctaatttaaaaaatatgttggtgtatacatcagaaaatgggtttgatcatttatgcttacccatatcacacccaaggtacaaaagaatttttaaagctaatgtacaagatagacattctttagctttcaccagatcagaaatgattcttaacctaagagattggaacacatctgtgattggacggattagcagctatattgatgttgatagtaatcacgaaccttacagaatacaaagtgaaaaaatcctcaatcaagaacttatgtatatatcacatttaggtattcagacatcgataataaaattgcacaaacgaaacaacattaacctttcacgaataatatatgataggtgtcaagagaatactctttaccaaacaaattttaacctttctcagcagttatggtttgaagtacctatggaaagtcctaaatctaaaactgcactctttcgctctgatgtggccgaagatgaagaagaagatgatccttgggattggtggtgtgaaatgagacatatgacctcatctgaccggagattaggcctagctttgttattggcaacagatttgccaagccaggaagtgcagaaccgttggctcggtgaacccatcaaagccgttattattccaacatctatattcctaacaaacaggaaaggctatcctgtgctatctagaagtcaccaaacattcgtcaagagatgtgctgctcttggtgctctaccgattgttactggaatcattagacatgtagcgcctaggaactatcttcagtatattgatcatgtctatcaatcaaacaattggacagatcccgtgataccttacacacgaggatttgaggatcatttacaaatacccttacagccattaatggacaaccttgaatcccatacttatgaaatcttcgagaaggatcctgtaaagtacacagagtacaaacatgctatattccttgctcttttggatagagtacctccagaagaagctgaaactaatgttcaggttgtaatggtggttggtgcaggtcggggacccttggtagatgcaactctaatggcagcatcttctgccaaaaggaaagttaaggtgtattgtgtagaaaagaatgtaaatgcacttgtgacattgtattcgacaaagtcggatgaatggaaggactcagttgaagttgtttgttctgatatgagggactggaaaccgcctgtaaaatgtgatatattagtgtcagaactgttgggctcttttggagacaatgagctatcaccagagtgccttgatggtgctcaacacttactcaaagatgatggcatcagcattcctggtgaatattcttcctacctctgtccaatacagtcatgtaaacttcatgcagaagctgggcacaacattgtacctgtcggcaagttgcccgttgcaaagtatgaaatgccctatgtcgttcatcaattgaatacctatcctatttcacctattcaaaaagcatttacattcatccatcctaacagggatgaagaagccgacaataggaggtttaaaacatttaaattcaaagtggaacaagacagtgttcttcatggattttctggatattttgatacaatactttataaagatgttaaattaagcattgtacctgaatcacattcaaagggaatgttttcttggtttcccatatattttcctatcaaggatcctgtaaaactcaaaagtggagatgacctagttgtccacttttggcggttagctgacaagaaaagtgtttggtacgagtggtgcgtttcccaacctgttcaaactcctatccacaatccaaatggaaggtcctatagcataggactgctttaacaattatctttagatattaaataaacttttttttaaaaaaagtaataaatatagaataaacatatatatttctaaaatgtttgaaatttggttcattttatatataggccatatttttatagttataataaaaattgatctcaggtaaaaaatttcacctttttttgaaatattcagataaatatgtttagcttaagcctacattactaaactttaaatgtttctggctttggcttat

SEQ ID NO: 292 - DNA, 802 bp, Nezara viridula
gattagtctagtttgtttcctcaatataattattcttgtcaatataattaacatttaattaatttaatgttttattttaggccctggataaaataaggtatgaaacttatgtcccttatcatcaacacattctattccaacaaagaaattttcctccgagaattgatctctaactcttcagatgccctggataaaataaggtatgaatctcttactgatgcttcaaaacttgaaagtggaaaggagctttacatcaagatcatccccaacaaaaatgaccgtaccctgactattattgatactggtattggaatgactaaagcagatttggtcaacaacttgggaaccattgccaagtcaggaactaaagctttcatggaagctctacaggctggtgctgatatctctatgattggtcagtttggtgttggtttctactctgcctacctcgttgctgacagagtgaccgtcagttccaagcataatgatgatgaccaatatctgtgggaatcttctgctggtggcagcttcactgtcaggcctgatccaggtgaacctcttggcaggggaacgaaaattgtcctgtacatcaaagaagaccaagctgaatatttagaagaaaggaaaataaaagaaattgtcaagaaacattcccagtttattggttatccaattaaactgcttgttgagaaagaaagagacaaggaaataagtgatgatgaagctgaagaagaaaaagaagccgagaaaaaggatgaagaaagcgagacccccaaggttgaagatgttggtgaagatgaag

SEQ ID NO: 293 - DNA, 421 bp, Nezara viridula
cgcatacgtctttctgttgataaggaaaaacgtaccctgacactatccgataatggtataggaatgcgtagagaagaggtgattgaaaatttaggcactattgccaaatctggcactaaatcgttctttgagtccctaggaccggaatcagctaaagatagtcagttaattggtcaatttggcgttggtttctactcagcttttatcgtagcagacaaagtttcagtacgtactcgtgcagctggtgctacagaagatgaagcagtcttctgggaatcggtgggcgaaggagagtatactatcgctgatattactaaggccgatcgcggtacagaaattaagctgcatttgcgtgaaaacgaagatgagtttctcgacgcttggcgtgtacgcagtatcattagcaaatactctgatcata

SEQ ID NO: 294 - DNA, 3305 bp, Nezara viridula
cataagaacaatacctaattactattttaataggttatactaaaggttttaattagtccatcaaaacattagaatcactaatcatttatacaataaataataattttgtcagcagtaggagaatacactttatcgaaagtgattggtggagagcgtggtatttggtgctcactgattggtcgagagttcttccgtggacttgttccattggtcgacagttagtctataggccggtgttatcctggcggtcattagttacgagttgagtagttgtgtgtatttgataccggtcgcgaaaaggttaaataacgtttaatctggtcaagggacaaatatgaagaagttaatatttttaggtttaggattgttgttccttttaggaacaacaaaagctgaggaaactgtggaggatgatttgggagctagcagagaaggttctagaacagatgaacaggttgttgaaagagaagaaaatgctattaaacttgatggactcaatgtagctcagttaaaagaattacgcgaaaaagcagaaaaatttgcttttcaggcagaggtcaatcgtatgatgaaacttattattaattctctctatcgcaataaggagatcttcttgagggaattaatatctaatgcttctgacgcacttgacaaaattagattactttcactgacagatacctctgcgttatcagcaactgaagaactttcaattaaaattaaggctgacaaggaaggaaaagttcttcacattaccgatactggtatcggtatgacaaagaacgatctcatcaataaccttggaactattgctaaatctggcacagctgaattccttagtaaactacaagatgaaggaacatcagctcaggacacaatggatatgattggtcaatttggtgttggattttattccagttttctagttgctgaccgtgtgattgtaactacaaagcataatgatgatgtacaacttatctgggaatctgatgctggaagctttagcataacagaagatccaagaggaaacacactcaagcgaggaactcaaatcagccttttcttgaaagatgaagctacagactatctggaagttggaactttaaggaaccttgttaaaaaatattcccagttcattaatttccccatctttctctgggcggataagactctcactgtggaagagcccattgaggaaactgaagaagaggataaaagcaaaaaagatgaagctgaagaagatgttggtgttgaagaggaaaaggaagaaaagccaaaaacaaaatctgtacaaaaaacagtttgggaatgggaacgtctcaacgatcacaaacctatctggactagaaaaccaagcgatgtaactgaagaagaatatgacgagttctacaaagcgttgacaaaagacaaatccaaacctttcgcacatgtccactttgttgctgaaggtgaagtcagcttcaaatcacttctttatgtgccagaagctcaacctgcagattcattcaatagatatggcactgcttctgataatattaagctatacgttagaagagtatttattactgatgaattcacggatttactccctaaatatttggctttcctgcaaggtattgttgactctgatgatctacctctgaatgtctcaagagagactctgcagcaacataagcttttaaaagtaattaagaaaaaattaataaggaaagctctggacatgttcaagaagctcagccctgaagatgcaaagaaattttggaaagagtactccactaacatcaaattgggaataatagaagaccctgctaaccgatcccgtttggcaaaacttctccgtttcggatcttctgctgatccaaaggaaatgactactcttgctgaatatgtctcacgtatgaagccaaagcaggagcatatctattacatggctggttcttcaaggactgaggttgaatcatccccatttgttgagaggctgctgaagaaaggttatgaagttttgtttctcgttgaagctgttgatgagtatactattgccgctcttccagaatttgaaggaaagaaattccaaaatctagctaaagaaggttttactcttcctggtgatagcaaattccttgaaattgctaaagagaaatttgaacctttaatgaaatggctttctgaaaatgctcttaaagataagatatcaaaggctaccatctctgagaggttaactgattcaccatgtgcacttatcgctccaatgttcggttggtctggaaacatggaaagacttgctatttccaatgctcaccagaaagctgatggtgcagagaggtcatattacttgaatcagaggaaagctctggaagtcaacccacgtcatccagtaatgaggcatcttttaactcgggtcttagatgatccggaggatgctaaagcaaaggatatagctgttatgttgtttagaactgcaaccttgaggtctggttatatgttgcaagaaacagctgaattcgctaaaggtgtcgagtcaatgttaaggcagtctctaggcatctctgcggatgagcctattgaggaagaagaagaggaagatgaaacaaatgaagtgaaccaagatgagaatgagacttttgctgatgaagatgctgacaacaaagatgaagatcatgatgaattgtagttgagcacactgtgatttaagtttaatttattttgtgtaatcaaataatttattaaaactgttgaataacttcagcagtggaagaactgattatttgttaggatctaatcttagcaattcatccattgttcatttatttacactctcgtatttaattgaaaacgcgctggtaatctcactgagtgtttctgtaaagaaataggacattattcttagggaacttcattacctgcttaattattaagtattgagacaaaagatattcaaacttcttaaacttagttttgagttatttataagtttggataaggataaataaataagcctattaattggctattgactgataaagtcttgtatataaagtaaatgttcataagatatattaagctgaatagttttatgtaaatttgtgaagattcatttttgtattgtaatggataaaatacttataaaatgccatttattcagacttttttaattagttcctcaactcctttaaattttatgtaactattaaagaaaactgcattttctgatctattgcagatcagccaacattgagctgctgattgtctcaacatcttaataaacttgtgataaattttatgtttatagaataataaaactgtcc

SEQ ID NO: 295 - DNA, 1179 bp, Nezara viridula
ccaatatctcttctgccacccctgctaatactacgactgccacttctgctaaaactagtagtaccacctctggaactcctatttctggctctaaatcttccgaaacgattccttcgaaaccaataatcaagggctctgcttcatcagcagcgtccaacaccaccaccaccacctcctcctcaaagaatatcccttcgtcctttgctgctaaatcggaagattcgtcgtctacttcccctacagacacaagttgttctttccgtgttttagtctctgacagagaaagtggttgccttattggtcaaagcggacaagtcattgactcgattcgcgaggaaaccaaaaccaaagcaggcatttctcgcctagttcctggcctgcatgaacgtatcctctctgtgtcgggatctttatctggtgcagttcttgcgcttagttattttgcgcaggcattgtgtattactgctgcggagcaatatacgtttttcccattgaaacaattgagttccaatccttgtgttgatggccagtcgactgtgttgcgtctattgattccaaacccgcaaatcgggtcgcttattggctcaaagggtctgcgcatccaatcgatccaggcgcagtttaacatctccatgattgtgtccaagtccttcttgcccggctcgaatgagcgtttggtggaattgcaaggcctggttgatgatttgtcagatgcattgcgtgcgattgccgagtacttgcaggaagacactgcggatatttccacgactcttcaatatgacccgactggatctgcgggatcttctcgaggtcccggccaatcacgtggctcgtacctgaatccacgctcttctcgcagtagtgctagtggcactgctgggcccgccgcctccatcaaggtgaatattcccaaccatatggtgggcgcaatgattgggaaacacggaatgcggatccaaggtgttcgcaaagtgagtggtgcggcgattgccatttccgatgaggtggatggtgaagaagaacgagtattttccatttccggtactgctgctgcagttgaaaaagccaaagatttgttacatcacaattataagcgcgaagaggagagacgggcggagtatgcggcggatgtggctggacaagatgctaatggtgaatctggacatttgtgaatgctcc

SEQ ID NO: 296 - DNA, 5244 bp, Nezara viridula
aaaaaaaagaagacaaagcaaagacttcccgaagatggttacagaagcaaaattcaaaggtttttaaacccttgcaagtcatatccatctaataaacaaattcgtagaagactcaaagagctggaacgtaaagtaaatgactttgaaaagttttacagtaatgcgctcgttaactgggttaaggattccaaggaaaaggaaaagagtaatcgtgatgacgttacaccagtttatgtaggtcgtaatgagaagaaaaaagttaaacttattcagaaggcagatgaagcaagtttgttggaaaagcataaaaaaaatgaaaatgataaaaaaatcactaacaaaaaaggcacacgagacctgtcaaagaaacaaagacccaacaaatcaactatcaattttgagaacccatttgttgttcattcaagacccatagctgatagaggaatagctaagaataggtatactatgagtcaacaaagaagattgagtccctctgcagtcgagctctgcctttcggggagatactgcaagctggatgcttaggagcaacgtataggactgattctacggcctacagtacatgttactgtaagacacggcgcgtgactggttaaacttcagcaagcagcatggacgagggacaagtgtaccaatcctcacagttgttatatgtctatgatgaactgttcccagctttaccggaatctgccaacccagctccggcatcagaccttggaaaatggaacaataaaatgagaattggttcttctgtaattactcaggtttttcgtgtaccggcagaagaaagacgttttgatcacaatgacagctttggtgaaaaagattcagtaaggacatgttcccagatcatgaaggaaacaggagccctaatcgagatatcatccagtaaggatcaatccttaacattccttgtcactggaaagacagataatgttatggaagctcgaaggaagatccttagcgtttttcaaactcaggctatgcagagacttagcattccaaaagaacaccatcgcttgatccttggtaaatctggggttagactcaaagagattgaaaaggtgacatcaactaagatacatgtgcccctaattgtcgatccctcagaggaaattactgtcgtcggaactaaagagggagttgataaagctatccatgaaatacaagtcatctctgatgaacagtctaaaaaagctttcgaacgcatttccatccctaaagtttatcatcctttcttgagtggagcttatggtgaaaatgtcacctccctgatggcaactactggcacccgaattcacattccaccgccgtcagcccaagttgatgagattacaatcgctggtgagaaagagggtgtcgcagtagccaaagatagcctgctatctatgtacgagtccatgcaagacaagtacactacagtttgtgttgaggtaagcaaaatgcaacacaaatatgtgattggacctaaaggtaccggaatagcggagatcttgcaaagcactggtgtcagcgttgaaatgccacctctcgactctagaaaggaaactataacactccgtggaccacaagacaaacttggaagtgcccttaacatggtctatggcaaagctaacagtgttcaagcagtaatggtgaatgccccatcttggattcataagtatatcatcggcagaaaaggtgccaatattaagcaaattacacaggatttgagcaaggttcatgttcagttcactgaaaaagaagataagataaccatcgaaggccctccagacgaagtcgaacaagcgaggaacaaattgaaagagcttacagctgaaatggttaataagttgacatttaccaccctgacagttgacccaaagtattataagcatatcattggaaagaacggcgcaaatgtgaaccgcctgaaggaacagactggtgtagtcatcaatatttcagatactgatcagaatgtgattcgcatcgaaggtgacaagaacggagttgctcaggctaaacaggaacttgaagatatgataagcaaaatggaactggaaaaagaaaaagatgtaataattgactgtaaatatcacaggagtttgattggtcaaaaaggagaaaacattagagaagttcgagataagttcagtcaagtgcagattttcttcccatcacctgatcaaaagagtgacatcgtcaagttgagaggtgtgaaggaggaagttgataagtgccataagtatttgatgaagaaagtgaaagaaatcatcgagaacagttatcaattagaagttcctgcttatgggtgccacaaatatataattggcaagggtggatgcaacattaaaaaactacgagaagagacaaatacaactattgaaatgttgtcagaaggttccaaagctgatttcattactataactggaaaaaaagaaaatgttgaaaaagcaaaggaaatgataatgaaaattcaaaatgaacagatgaacatcgttcaagaagaagtcgctattcctcccaaaatgtataactctctgatcggagctggtggaaagttgatccgttccattgaagaagaatgtggaggcgttagcatcaagttccctcctcaagacagcaagagtgataaagtaactttacgaggacctaaagatgatgtaaagaaagctaaacaactactcctcgagcaagcgtccgaaagggaacttcatagctatacctctgaagtgagagcaaagccgcagtatcataaatatctcatcggcaaatctggtgctaacatcaacagaataagggagaacactggcacaagaataattttcccatcagatcgcgatgatgacaaggaactcatcacaattatgggaaaacaagatggagtcgagcaagccaaagcagaactgttggctgctatcgagaaaatggataatgtacttgaatcagaaatgatagtagatcagaaacatcacaaacattttgttgctcgtcgttgtgaagtgttgaaacaacttgaagatgaattccctggagtggctatatctttcccgcgaaatggtgtaagctctgatagggtgaccattaagggacctccgcagcatattgaaacggttaaacagaaaataactgatatcataaaagatctagaagaaagagtgacaatatactgtgagattcctcaaaagcaccacagagctgtgatgggtaacaaaggaagcaaagttcaggaaatcgaatataggtttgatgtgaagatcaagttcccggacagaaatgccagagaagatgctggcggatatggagatggtgaattgatcgaaaacgttgaacacccagtgatgaatggcgatgcaaatggacctggcccatatcctggtgacttgattagaattactggcaaacccagcaactgtgaggaggctgccaaggcactcaaggagagcgaaccaatcgaatacttgatggacgttcctgctgaatatcacagaggcattattggaccaaaaggacaaaatgtccgagatatgatgaattcatttgatgtttacattgacataccacccaataatgctcagcaagaaaccatcaaaataattggagctcctgcggctgttgaaagagcaaaggaaggtattctcgatgaaatgaggaaaattgatgaagaaaaagaggatagaaaattgaaatcatttaaactaactcttgaagtcgatcctgactaccatccaaagattattgggaaaagaggaattgtgattacaaaaatacgcgaaaaacatggtgttactattatgttccctaggcgtggggatcctgatgagaatattattacaatccaaggttacgaagataaagctcatttagctaaagaagacatattagctattgtgaaccaactgaatgaattgactaaagatgaattagaaatcgatagtcgtgtgcattctcgtttgatcggagctcgtggttggtctatcagaaaaatcatggagaagttccaagtggaaatcaaatttccacgcagtactgatccaaatccaaacctggtgactatcattggtcaggatgaaaatgttttggatgctaaagaacacctgaggtcattggaagatgaatatctggatgatgtcgaggagcaggagatgcgcgaggctcgcactaacccacttcgtggaaatgattctggctctggtggcgggaacggcgccggcgctgctgggtttgtggtgaaaggtgccccctgggaggtgcccgacactgcttccactcaggaatttccgacgtttggtgccccagcgccgggcacccctgccccgtcctggggccctaggcgctagctatcaaagttccctgttcttcctaatctattgctaacctcctctaccttctcttaaatagccttgtaacgtaccttattaatcacaataagtaaaaaataaaaagtaaaaaaaaaagtaaaatacctactaaaaaaaagaactaaaatggacactttgaacttttccactgcttgctgaatggaaacgacctttggcagtcaaacggacgaataaaattgaaattttggctgaataaacgtaaactgagaatcttatgttgccttattattttattttttccttcaatagtgcaatatgtcaaaagtaattccaattttgcaaaaaataaaatattataggaaagaacatatgtttgtttaaaacttaaacatatatgttatatgaatgataatcatctctttataaagggaactgtaacattctattgtatccaaatgatatgtagaaattagttgttacatataaatcatctttcatatcacatctgtaagtgtattgatttatatatatatattatttgttgtattttttttttttaattatagattatatatgtgtatgatttataaagaaagatataaaacaaaaaaaatataaatttgttatcaaatgaaacagactgaagggtatattgtattatggtgaaatttatagcgctttatatatatagtaagtttatctgtatatatttacacatatacacactatatatttaatgtgtgagtgtgtgtatgtgtgtagcgcattagtttttaatcacagtgaagaaattcaccagggccgatataatattgtataattgttatgaagacaatattttttaacaagaaaggatatctggggcctctgaaaggttggatattgaaataaattaaataaatgaccaaaaaatcgaaaaaaa

SEQ ID NO: 297 - DNA, 1876 bp, Nezara viridula
aaaagacatgcctggcctggcaaacctggtccactgtagcaactctccttatgtttattcacttttggttgaaacctcgttgtcagacaggcagaagtggccgcgttcttttaagttattgataactttcattctagataccaaataatgccacagaagaaaaaacaaaaagctgggaaaaacgggttttatttttttatgctggaggttcaaaagcaggaagctctaaagggggttcaatatagtttgcctgaaatttctgaaattgcaaatcccatgtggactaacatgaccccagaagaacgtaaaccatataatgacaaggcatcaacgagtgtttccaaaaatagcgaagacaattcaaaaaaatatacttctttaggcattagctatgccgatgtagatgctggaaagagagagttggacgaagctcgtgatcttatgatagcaactattaaaaacactgtcgcaaatcttgacatcagaacatctctgaagactcataagttctttgtgtgccatgctaactatttctataagtctgatcatcatatttattatcctgctgaaattgctcttgcagccttttctttggagttgggtgttcttggcaccattcatttctttgtagatcctggaaaaatacctcttggtttcaaatatgaagcggcagattggtcaactagaactcatggaattccagtaaatgatgctagttggaatgaagggattaaagatcctctggaaatgtttggaatggttcagtcgtttatcaagaaatttactgagccccctgaagtacctccaatctacacaatgttcgatactttaaatgctgacagtcgtctttctgttgtgaaatctgcattgaatatgttgtgtgatgctgcaaatgaagattcctctctatttcgtgtctattgtttatcacatttattctatgaaattagaaataaatgttctgcagaaataccaagtgtagccataatgaaaagtgaattagacaaagatgttttctcatatgccagggacctaggttgttattatcatgaagaaaaagatctttcgatgtattgttcgctttctatagtaacaagatgggtgtttacaatttgtgatcattgttgcaaacatctgggtgtaaagctcatccttggaagacatgtgccaaaagatacagatctttcagaaagtgctcgatttatagatgataaacaatcttctaataagttagatcatggtgcttcttgtagtaaacccttgaccatcattgaccatggccgtttaaaagaacaaagagctgaacaaaaacgggcgcaggatatgcatttgcgtgcaagtgaaaaaataaggcttcctaaatccagttatagcaacaaaattggtgccagattcagtcaagaaggtgccagtagttctcaaagctctctggaaacaaaagaagaatccaatgaaaatgaatggtgcatcgtaaaaggaaaaggatttggacgcggacgtggtttcactgtagaaaaatcttcagctgaagagcctatctggccagtttctggaaggggtcgagcatttcaacaataaattttaaaagacattttaatatagacaaaaaattttaataattttgatacaagttttttatactgttttattatataaagaaacatcatgtacaaaacaaatatgtctttttagaaaatatatgcttcagtaactgttgctattttgcaattagtctgtattatttatttattgaaataatgaaacacttttaaagagctaaattacaaatttttttattttaattttaggttattaaagtaattttggtgtattttacaggctatgtagtaaaagttactttaaataatcaattggt

SEQ ID NO: 298 - DNA, 2888 bp, Nezara viridula
cattttgggctcccacttagtggtgtgttcatcatagtttataattgtaagttgatatatttttgtacatcaatttatatttatttttaagtatggaagagggaagagcccgaggaagggctaggggcagagctagacaggaccctaagaaaacagaggtgacccataatgtgattgaagcaagaggagttagatccaagccattgcaagctcctccaacagtagcatctgtgactggtgatatgaaacagctttcagttacaccaagaagaactgttggaagaaaaatgatggacaaactggactatgtttctattaggtcgaggcctaaagaacttgtaacaaaacaaggatctacaggacagaaagtcaaactacaagccaattattttaagctagaaacacatcctgattgggccttgtaccagtacagagttgatttttcacctgaagaagaaagaactgccgtcaaaaaggctctactcaaaccccataaagatatttttaactgtgcatatctgtttgatggtactgtgttgtatgtatgtaatcgtttaaaaactgatcctatagaactttttttctctcagggatacagatcgaaagaagattagaattaccataaaatttgtgggagatgtggttatgggagattatcagtatctccaagtttttaatattattatgcgcaagtgccttgacaatctaaaattacaaatggttggccgaaatttttttgatgccaaagcaagaattgaaattcgtgaatataggatggagctttggccaggttatttaacctccattcggcaatgtgaggatcacatcctcatgaatgcagaaataacatacaaagtaatgcgttgcgagactgtttttgatttaattgttaaatgcaggtcgtctgaagattgggaaaaaacctttgagaatgcaatcataggtaccattgtgttaaccgattacaataatcgtacatatcggattgatgatgttaattttagttgtacacccatgtcaaaatttaaaattaagaacggtgaatcatctacttactgtgaatactacaaaacacgatatggaattaggattagggagccaaatcaacctatgctggtttctaaagcaaaacctagagaagtccgtgcaggtatgacggaaatcatctatttggttccagaattgtgccgtttgacaggattaactgatgacatgcgcactaacttccagctcatgagagcgcttgctgagcatactagagttactccaaaacttagaattgagaaattgttaaaatttaatcatagattaaaagagagtaaagaaatcactaaagatttggattcatggaacatgaagttagcagagtcattgataacatttgacgggcgggtccttcccatggaaaaaatttactttggagataataggacagttactgcaggtaatgatgcagattggacccgaagtatgcgagatcattctatgcttactagtggaaatttcaaatcctggtctattgtttatttaggaagaacaaagagtgaagtaaacagctttattcacactcttgcaaaggcagcagagagtttgaactttcgtgtccctacaccaagaatgactgaagttgtaaatgacaggtgtggtagttatgtcgaagcattagattctgtgatttctatgcataatcctcagttaatactttgtattgttcctaacagcagagctgacaggtatgcagctatcaaaaagaaatgttgtgtcgatcgagcagtccctacccaagttgtagtggcaaaacatttcaactccaaaaatctcatggcaatttccactaaaatagccattcaaataaattgtaaacttggtggtataccttggactatcgcgaatccactaaaagggttaatggtggtgggatatgatgtttgtcatgatgcttcccgaaaagatatgtcttatggagcaatggtggcgtcgttgaatccttccctttcaagatactactcatctgtgactcctcattctcatggagaagaactatctaatgatttagcgatgaatatcttcaaagctattattcgttataaagaaaacaatgatggcggaattccttcaatgataataatttatcgagatggagtaggagaaggtcaaataccgtttgtttataatcatgaagtaagaattgtaaaagaacgactgtctgaaatttataaagataaacctcccaagttaggatttgtgatagttactaagagactcaatactaggctattcctcaacggcagtaatgctacccctggtacagtcgctgatgattgcatcacttccccagaccgctacgatttcttcctcgtatctcaatctgtacgtcaaggtactgtgagtcccacatcatataatgtaattgatgattcaacaggtctagatgcagacaaaatgcaacggctcgcttacaaaatgactcatttatactacaactggagtggaacagtgagagttcctgctcaatgtcaatatgcacataaattagcttttcttgttagtcaatgtttacacagagccccaaatcctgatcttgatgatctattgtattttctttaaaatttatttaattaagaatcaatatttccaatgtacttgtttttagttaagttattttaaactttaatattatttattttatttttattcctatttgaatgatctaattgagataagaattatcttaactaaatattttagccttattggtttttaaaaggagattgatgttctacagttcttttacagttacatatttgaataccataatttttattttcgttgatgaaaagaattatctttgttttacagacaattgcaacataacatgtatttctcag

SEQ ID NO: 299 - DNA, 1501 bp, Nezara viridula
ctccatcttgtattccaatagttggacgcttgctgaaatatagcgttgtttttattttgggttaacatcaacggattttatctgtaattgattacactaagttttatgtatggcagtaatctaatattttaagaagagaattcttaagctcgagaaagctgaaagtatcttgttcaaagttatctgtgcctataatgatgaagggtgacaagaagagcaaagataaagatgattctgcgcctgccgattccgctgctgaagaagaggagttttcagttgaaaaagtattggatcggaggtttaggaatggccgggttgagtatctacttaaatggaaaggatactcggatgctgaaaacacatgggaaccagaagaaaatttagattgtccagatttaatacaagcttatgaagacgaaaggaaaaggaaggtggctgctatcgaaccacttaaaaaagaagaaagcaataaaaagaggaaatctgttagcaatatgaatcctcctccaacccccccagctgctactgtagagaaaaaacagcccacatctgaaaggaaagaaaaagctgttaaacctgttaataaaactaagcaaatagaagaactaaaactacggggttttgaacgaaatcttgagcctgaaaaaattatcggagctacagatgcaagcggagaacttatgtttcttatgaaatggaaaggtacagaagaggctgacctagttccagccaaacaagccaacgagaggtgtccccaaatagttatacatttctatgaagaaagattgacatggcatacttcagatgtaactgactttgagtccaaaggaaaaaataatagaaggaaaatccaggtggaatgaagagggattgtttaattaggaaagagaaacaaaagccataaaagaagaagtaattacttttcgacgaacaataaaaatgcttctctttcttcacgtgttcttatcgatgatacttgttgagatgtatattaaattttattatttatttttcttgttttttggagcatattttttttttatacaagttttttatgtgcttatgaaattctgttaaagattaaaataaattttataaaaactgaaatttaatagcagtttgctcactatttctatattttgaagactcgtaaatcctgccatctatgtttttattggatgtcatgtattgttaaaaattatagattaactttatattaatttagtatctcatgttttttaagagatattcattgctaagacttgatggaatattttattgagttgtgtttagcattctgtagctatccaatgaactaatataacttctattaatcctggaaaaaattgatgttttccgctttaggagtgttattggttgttaaatagtgtaaatactaagtaaaataaatagtcagtgtttcaattgactaatagttcaagaattaatttgtgacttaaaaattatgttaatacatgaatctggttgtgtaaaattgaaa

SEQ ID NO: 300 - DNA, 1712 bp, Nezara viridula
cagacgtgctgtcaagattcccgcttgtgaagggtttcttttgaagttagttttccgtctttgaataatggatgtaatagaaaataatatgaagtcatttaatttcggggctacgtctcgtctcaaggatggtattgtgctcaaggatttggtgaaaaataatgcagcagaattcacgttagacgtttctgaaggcataaaagatgaacttgatgattttgagatgagtccatttgattatgaagacttcagttcatttaataatagcaatgattataaagaagcactgggtgatctatcaaaaattcaatttgatcaattaaagaaaaaaatgacaaatgttgttgatgatggagatattaaaaaaatggttttaagaagtggaagtggagaagtaattccttctgatgctgtagtttattttcattataaatgccatttagaaatgcaagatgtaccatttgattcttcatatgaacgcaacaagcccttgcgaattcaaatgggaatcggagctttgtatccaggtttcgagtatagcctgttgtctatgaagctcaatgaacattcaatatttctagtgagtcctaaatatggttttggtgaaatgggctgtcctcctagaatccctccgaatgctactctgcttttagaaattgaacttctcaaaatctttgacagtaatgaaatcaacgctattgatgcaccgttagaagaaaaagattccttttcgaaagttttctctcgagcaaaggagtatcttgctattgctaataatcatcatgtcaaaggagaacttattcctgccattaataagtttaagaaagcggaaaatattcttctgtcatgtaaaatgtgctctgatgaagaagaaaatctttgtagaaagctactttttaaaatataccttaatatgtgtgtatgttataataatccaaagttgaattcacctgagagagtttgtattgcagccagggaagccttgtacatctacccagaaaaggctagacaatctgcaaagctttatttccatatgggaaaagcacagttgacatttcaggactttgatagagctagtaaccacttcaagaaagcattatccattgaaccaaataacaaggatatcaaggaatttattacagaagttgaaaggaaaagacaaaaatatcttcaacatgaaaggttatcatatcaaaaggtatttcaatcacataaacctgtaccaaaagatgttgaacccaatattatctttgaggaaacctttcgtaagcagttggcagagataatcaataaaaatattgataaggtacagcttccagttggtcttacgtcaaaagaaaaaaacctatgtcgagagatttccgaacaatatggcctccattatgaggaaataattattggtgggaaaaagactgtgtatgtaacggcaaaagattgaatgagttatcattgtttctttgaggaaaagatttttatggactttgttgtaaagatgtattaattttacagaaaactatatattactctataggttgttattgttgttttataaatatttttattttctcttaactctctttaaaattaatttaaatatatgtttagataaattcttctattaattttatagactggtaatatggactggtcttggagtttcaaaaattatttttttaatatattcgccttattcaagaaaattaattgtgtta

SEQ ID NO: 301 - DNA, 1568 bp, Nezara viridula
attgaagcaatcagtcaattggtctccacagtacgacgttcaaatattgagtagaaagaattagtaacttactcatatttttacaatggaagaattacgtgctaacactcatattaaagatagtgttctaagggatatattggaaaagtctgcttctgaatttacactagatgctggtgacactcttgtagatgaaacagaggaagctcgaattgaccaagtttataagtttgatgaatttgccccatttattaatttagattgtgttggttgtggcgatacagaagaggtatctactaaaacgccctttgaaaatataaaacaaaaaatgacgaatgttacagaagatggaaaaatttcaaaattgattttaagatttggtgatgataacttagtacctcctaaatctgtgatttattttcattataattcttatttagaaatggaagaaattccttttgactcttcctatttacgcaatgaaaagcctcttcgtatgcagttaggacttggagatttgtatttgggctttgaaaagagcttattaacaatgagagaaggtgaaaaatcacagtttctcgtacatccagactatgcctttggtgaattgggtgctcctcccagaatcccacccaatgctacaatacttctggaaatcgaacttataaaaattgttgactgtagtggcatagataaatcagatgagctatctggagaaaatgattcattttctgaaatcttttcaaaagctaagggttatcaaatacttggaaatgatttttttggacaaggaaatatttcagcagctattgacaaatataaaaaagcagaaaaggtgctattaacaactaaaacaaataattctgatgaagaaattcagtatataggactcttgctgaaattgtatataaatttatgtgtttgttacaatcatccaaaaattaaagcccctgaaaaagtatgtagtgttgctaaaactgcattttttggatgtacagaagaagcaaatgaatttgataaagctagtaaaaatttgaaaaaagcactctctttggaacctcaaaataagaacactaatgacttattagctgtgcttgaagagaaaaagaaagcgtattatcaacatgaaaaattggcataccaaaaggtttttggatataaaaatattaaacctaaagaagaagaattgaagcctgaaagtgaatttgaaaagttattgaaaagtcaattaaaggaatttgctacaaacagtacaaataaaatacaactccctggtgggcttacttataatgagaggtgtatttgtcgtaaattatgtgaggaattgcgtctaaactatgatgaaagttcaattgctggaaaacttgctgtctctattactaaataatatcttgtatttttattgatatatttgaatcatttcaagtttgaaatattttgttcgttttgtatgttttaactcaaggatgttcctttttagttataaaacatgttagttatgcaaacatttaaaagagagaatctgattttataattacgtgacatgaaagatggctgtgatatttttt

SEQ ID NO: 302 - DNA, 564 bp, Nezara viridula
ggggatattgcttgagtctagttactcctgaagtgtgaaggttttctcttcgttcttacgggtcttttatattaactttattttgagatttcttcagcatttaaagccataatgggcgtagaagttgaacaaattatccccggagacgggtcaacgttcccaaaagtaggccagaccgttgttgtccactacactgggactttagaaaatggagttaaattcgactcatcaagagatcgtggcgtcccatttaagtttaggttaggcaaaggtgaagtgatcaaaggttgggatcgaggagtagctcagatgtgcgttggtgagagagcaaggcttgtatgcagcccagactttgcatatggatcccgtggacaccctggaattataccacctaatgccaccctaatctttgatgtggaactgttggaggttgaaccttgatctactttatgaactaattttatttacttattttatcctaaccatcatgtctctaatgctgttaaggcattttcaatctgtcttttcttctacctcattatgttcattgtcattgtacatcaa

SEQ ID NO: 303 - DNA, 1794 bp, Nezara viridula
ccggcacgttcaagttataaataggttagagaaccttctagagtgttcgttctgattctccgttcagagcatttgagttactgcttctagttagtcttgtgtcttagacctaataactcagctcctactatatcgtttcatttgatcaggttgtagtatcagaatgggttctatggaccgaaatgcaaccccagaaaattttcgtctgaaagaagaatatactcccagcaataatgctgttgacgtttctcctaaaaaggatggaggagttcttaaagaaattatcagaccaggaacttcggaagggacacctcctcaggggtgcaaagtgattgttcattatgaaggaaagcttactgatggtactgtatttgattctagcaaagaaaggtcaccttttgaattcaatcttggaaaagggaatgttataaaagcttgggatattggtgtagcaacaatgcgaaaaggagagattgctatacttacatgtagggaagattatgcatatggttcagctggaagtccaccaaaaatacctccaggagcaacattaatttttgaggtggaattgattgattgggaacccgaaaatttgtctggaaagaaagataaaggaattctgaggtatccaattaaagaaggaaatggttttgattcacctaaggaatcatcaaatgttgaaatacggataaaaggcgaacatgaaggcagaatctttgacgaaagagatgtttcattttgccttggtgaaggaatagaaagtgacattccacctggagtggagaaaggtctagagaagtttatcaaaggagaaacgtctaggttagaattaaaaccacaatatggctttggagctattgggcatgagaattttggcatcccaccaaatgctcatcttacgtacaccgttacattaaaagattttgatcctgttgttgatatatggatgatgtccaatgaacaaaaattggaacagtcaaaagtattaaaagaaaaaggaacaaaatatttcaagttggaaaaatatcaacttgctctcaaaatgtatctaaggatagttgaaattttagattataaaaatgattttcaaggagctgaacaggcagaagcaaagtctctcttactagctgctaatctaaatatatcaatgtgtcagctcaagctgaaaaactatttagctgtaagaaaggtttgtgataaaattctcgaagaagatagtcaaaatgtcaagggtctctttaggcgaggacaggcatatttaggtttaaatgaacctcaattggctaaaacagactttgaagctgtattggcagccgagcctgaaaacaaggctgtaccacctcaaattgctatttgtaatgctaaactgaaggaaatacgatcaaaggaaaagaaaatgtatgcgaatatgtttgagaagtttgctcagaaggatcgtgagaaagaggaagaggagagaaagaagcaaccagatataatgaaaggctgctttggcgaatggggtgctgaagaacgagaacgtgaaccaagtgactttgaaaaagaaaatcctgatattctgatactcgagggatcaggggacttcaagaatatgtaaagaaaaaatgaaataaatgacctattcttttctgatttgaattatctcttttcatctatctataaaaaatcagtgttaaatgcttagttacacaatagtcattacagcttttatctgtatataatgaaataattgttttattataatttttttaaaaatctttcataaacattatttattatcttgtttatttttgc

SEQ ID NO: 304 - DNA, 4804 bp, Nezara viridula
ctccactgtggttttctgtggatgtttatgaacccactgtttgtcgtgcttggtcttaaaatttagatatttcttgtactttaagtttgcagtgaaataaattaattttatattaggtatctgttatgaaggggatattttatttgctgaattcaatttaatttttgttgtctatttttgttaaactgcagaattttggccaaatacaacaaaatggattatgcgactatccttcagatgtacagagaaggaggattcaaaaagattcatattgaaggtggtcagacagagggtcgtattgctatggacgttcgaaaaccaaaacccaaaggaagaactataatgtcgggactacattatgctgaagaaagtaaagctcaagataagcttgaacagttgaagttggatgaagaactgaagagtgctaataatatgtatggttgtgaagaccttacttccgttggtacattacccaatctaaatgacttaaaaccggaaaatttaactaatgtttatctaagttattctttcaagacaaagttgagtacaaatctgcttattcatgactataaagaggagattttgggacatgttgatactaatcaagttgtgataataaagggagttactggatgtggtaaaaccacccaggtacctcagttcatcctggatcaacatgaagaaatgaatatacattgtaatattgttgtcactcaaccaaggcgaattgcagctatttcagttgcgaagagggtctccaatgaacgaggatggccactaggttctattgttggatatcagattgctttggaacgtaattgttctcaagatacccgactgctgtattgtacgacaggtgttcttcttcagcagctagtgaaaaaacaatctctttcagattacactcatatcattgttgatgaggttcatgaaagagataatgaaactgacttcattctgattttattaaaaaagttgttaaggaatactcagtgcagaactaaggttattctgatgtcggcaactatgaacgtgaatcaattttcagattatttttcaagaactgtaaatggggttgctattgaaccacctattgttgaactggctcatatagccaaatatccagttcagtattactaccttgacagtcttcataacaggctgcctggtataaaaatacctgacattaatcttaatagtccttcaatttcaacttattcttatgacttagctagagcccttattgaggttttccgagtgattgacgagcatgaacatcatgataacgattttgtcggatctgtacttatatttttacctggtattgctgaaatcgaaacaatgtatgctagactcttcacttatacaggatctgttgaaaagtggtggttatgcccacttcattcatctatcactcatgatgagcagatgaaagtctttcaggccgctcctaaaggtcataggaagataattcttgccacaaacattgccgaaagttccattactgtacctgacattaagtatgtaatagatttctgccttgccaagcaacaggtgctagaacctgaaacgagctactcttgcctacagctgacttggatctctaagtcgcaaggcactcagagaggtggtagggtaggaagggtcatgccaggtcgtgtttaccgcctaattccgaaggattgttatatggagttgccagaggatataactccagaaattatgagatgtcccctcgaccagctggtcttgaaagctaaacagctaaggatgggcaacccagctacgctgttaggattggctattgatcctcccgatctgtctaacatccataagaccattcttcatttaaaagaggccggggctcttctcctaaccgctaatggacaatacaaggataacgatggcgacttgactttcatcggacaaattatggcatcacttcctctggacatccatctttccaagttgataatccttggtcatatgttttcttgcctatcagatgccataattatggctagtgcaatgtcggtaaagagcattttcagctcaccttttaggcagcagttggaagcttacaactcaaagctcacctgggcagattcctcttgtagcgatcctattgcttatttacatgcctattcgctttggaaattcaaatcaaaaatgggtttcttcaaacgatctggtggtgaaagtgaaattgattggtgtcgtaaatacttcattcaaggaaatcttatcaaagaggtatctcgattagaaaatgaaattgtgcaacgcttaaggacattaggagttgaagaaatgaaaggagaaacaagtatgacatggtctgcagctgaaaaacctattattcttaagttaatgattgctggggcattttatccaaattatttcattccttttgggtctgatgagaaggatgctgttaaactactcggtggtcgagatccactgacaacggtgtatttaacaggtttacctaacaatcaacccggtcctctctacactcatgcgatacgaaaccattttcttcattgtggatccaatattgaagtttcatttgatggtagcagcaaaatttacctaacttttgggagtagtatatcggctaaccatgaacctgaaaaatcagctctgatgccaggaaaaatcagcatggctgtcttcaggagcattaaactacgccagcttcagattccgatcacaataccagtgttgttacctcacgaagctcgaaaaagggcatttgaggtttttggtgataggttgactccgagcctcttcaatgtcatcaagaggaaagcagtaatgcctgttaagaagacaaacgtgccctctctcagtacgagcatcgttcctgtcgtgatcactcatattgaaaatccttccaagttttgggtaaatataaatgaacccgtcaactctaacaggatttattggatccattcttctcttaacagactgagtgaacctctgccgttatatactggcccctacgatgatggttctccttgtattgccccctataaagataagaagggacctcctgaatactacagagctcgcattatcagcagcattgaagtagattcaagaggagaagttataagagttcaggtttactttattgattatggtaaccaagaatctgtccacgcaaacgaactgagagactatcctacatctttaactaacgtaaaaaaggagccagatttagcactcgaagcaagtcttgccgaaattggaccagccttctctaaaaacccacgggggggctggtcctctgagaatatcaaggaattttctaaatttctaaaagataatactggtatagctaaaatattttctgttgtcaataatgttatggcaataacattgttttcatcagagttaatgggaaaaaaaacacttactgatttacgttttgaattatcgtttaattactaccttattaagaatggttttgcagaagcaattgatgaaccttatctttcaagagaaaaccatatgctgcgagaagctgcagtagattcgtcacaaaactgttatgataaatcaaatgatgacttgtttaatgataatttgtctgatattaattttgctcctcccaaacctgaagaatgtagaagtaaggtaactttgaaaggtccccgttcacctttggaaatgaacctgtattctcttcccaagaagtgtcaaggtaaagaaataataattgaatggaattccgttaattctgttctcttggatacttaccctatggacccgcacgaaagacttgtcgttgcagcttcagtgacacagaacactggcacaaatcggttaaccttgaggaacacaacaattatgcctaacatccatggattaagctctttggtatgccttatcttcgctcctagggtagaactgagggtggaccaggaaagacgacaattgactggagctctgtgtggacttggctttgaaccagaatctggagcagcttttttcccagaaaatgatctcgaagtgttgtttgatacaaagcttactcttatggatttagaagtggttaataagttgaggttttggatggactatatcatgggagggggagagggaccacacagtgaactctcaaggcctggaattataaagtcacaggagagaattaaaagttacatcacagatttgctattcaagaaacgcccttgcattacacctcagcctgtcacacacccatatgagtgggaccagttggaacccgatgagctcctcgaccctcagggaagcgctaccagcctatatcctctcatctggggcgtatcgctcgtcggtgaaggttctagggacaacgctatactttcaagattggaaacacttaaaatgatcgctaacggaaaagagactttcaagaatgctgttcaatgcgagttatgccaggtatataaccaaacgttgcaagaactaaggttgcaccttactacgacattgcacacactgaagctagctgatttcaaggaaagcatgaaaggtggaaaaaagaattgacacaaccaaaaaaaaatggctcaagttgataagtcaatttgtccagtagccattttaaatttaatgtgatttataaattttagatttaatattctaatttttatatattgttgaacatttttaatattttattgaaggcattatggttaataaaggttcctataagtgttttattttatatttcttcttttgaaggaaattttttgttgctaccattattttcactttatatttacgactattactgaaaataatattacatttg

SEQ ID NO: 305 - DNA, 4983 bp, Nezara viridula
ttttttgttcggttctctctgagtaacgatattgtcatttctagtttgtttctcttttaaatatataataaatgagtaagtcaaaatacaggtatataaccgtttcgtggagatcagagcttagtaacggaagtaagtatttgcgttctggtacttctgctctttgtaggagaatacgttccttgttgttctcaagaaagaaaagtggttatgatcatctgataaccgatgaggaaaaaaggcggctagaagaattcttagcttcaagaaaggaatatatggctagagctgaagttccattttcggcttattacgtatgaagttgacagcgaataatttatcgaggattacatgcaaattattggtgaatgtattccatataaaagattaggcttcaaccaattggaagagtttttgaaatctgttcctgaaatcagtgtgaaacgtagaggaggagaagtttacattgaagctaaggaatcacagacatctgctcatgtaactaaacttgtatcgaaacagaaaaaatcgggaaggaaaaaacctaaagctaacagaaacattcctccaaggtatttcagaacagcgccacgttttacgaaaagagtttataaagctcctctaatttcatcacctcaatataatcctcagaagcaatgttatttgcctcctctgaagataagtgtcccccaaaacaataacaccatcaattataatgctcgcatagttagtgaagttaaccgagcaagtaataaaactaattacccgatgccagttaatcataattatgttggagtaatggaaaggcctagcttggtttctcagtttacccccaagaatatgaagtacatccctccacttctcagtgataattctataaaacctgacatgacatttcgcaatgaaggtttgctttcgcccaaaaatttgagatatcctcctccacttctatccgataattctataaaacccgatatggcatttcgcaacgaggcttttattacgccttcatcaaataatttaaattcattcaaggaaagcgtctttaatagcccgatagatcactccagctatggtagtactcctactcctacacctcctgaagaaccttccaaaaagattaaacagctagctcaggataggctcgataaagtaaaaaagcatcataagttattagtgactgtttccctacaacaaggagaaagcacatcgccatatcaaaggcagttatcggcttatattcaagaaagaggctgggaagaagctgcttataaaattttaaaggaaaacagcggaaagcgtgtttgttattgcactctctccattttaatacctaggatggctccaaatctagctcctgaagttgtagattgtggcactttccctaacaatttttatgatgtcaacgaagcgaaagaatgtgtcgccaaacaagccttggaaaagttgaaaaaacgggaaatcttcaatacttttcccatcattcaagaccctgccctgatccttcaaagggtagagaggatggttaaggagaaggacacaggaaaatgggcttccagaatagaagatgagcatagaacattatttaaagaaattttacctccacattggcttgatgtagtgcatgcttctgatcagttcatcgtcgaagaactggctaactcttcattgctgattaaagtcaaggagaatgcagttccatttcctacagtagttgactcgacaattcctaaattagttcttccagaagataatacttgggatgtgtttgtcacacgagcagtttcagtcactgaaatctgtattagatttataggtgatgattacagtggattgttggacagtttaactagcgacatggaatcatggtatcaacagaaagaacatctagttaatccattccttgttgtgggagagtattacgcatcgtactgcaacgaaagctgggcaagagttcttgtcataaaaataaatattgatgacattcatgtcaaatttatcgaccacggtgatgatgatgttcttccaagatcagttttatacaaattggaaccaaagtttatgtccttaccacctcaggccattactgtctcactgaaaaacttggaaagctataaaaattgtaaagaagctccagattatttgttgacaaacattgtcggctcgtgtcttgttgctgttgttgaacaaagaacgcctacaatttctgttacgttgtttgacaccagtcaagaagaagctctaaatttgaatgagaagctgaaatatttattcaattataactacaaagaaaaaataaacattgaagaagatggtatacatcaagcatctgttagctttattgatgaaaatggaactgtttacattcagttcgttagtgaaacaattaatatactacttaatcaaatggaatatattgaagatggaacttatgaaaaatatcgtgtaaaagattatagccagctttttccagataaattatatcttttagaccagcaaaacagtgaaaaacatcgagtcaaaattattaatgctacaagtttaaatgggcaggtgttagtaaactttattgattccggtggtgaagaatcggtgtttgttgaagatctgtataatttagaagaaatatcatatcttctgtcacaaattcctgctcaggctgttgctgttaaacttcacgaagtcacacctgaagcttttacaccggaaagaatgtcacgacttaaggaattattgttaggtgaatccgttgtagcaaaaataagaaaaatcgaggatggtattccagtcgttgagttgttcaaaagaactgtgcctgaaaatttgatggcttccattaatcaaacgttgattcttgataatacactgaaaaatgttgtcaacaaactggaacagttttcttttaaatcgaccccaaagactgaaaaatgtgttcagaagaacattctgcagcaaattagtaacaattttccaagcggtagtatagaacgaagaatagccgagaatcgacctgttttaccagaagttggtgaagagtttcaaatattagttcaacaaactgcaaatccttcatttatcatgattcagcctttggattatgtcaacgttatccacaatcttgagaaggaaatgtgcgaattttataataatctaaaatctggcttggactcaaatatcaaggaaggagggctgtgtgctgtgagggacaagaactgttggtatcgggcccatgttgacaaaattatagacagtgagagtgtgtcagtaaaacttcttgattatggaagtgtatcgttagtattaaatactgatgtaaaaccgttaaaagacaattttaccaaagtaccatatgttggattttcttgcaaaatttcgggtattgctgcaaaacatggagattggagtgtagaagactgtttacaaacaagagttctcattgaccataagaaacttcttgctcaaataaaaggagttcacctgagtcaatcgagtcttggcggaattattttagaactgcagctattcgacctaaacaacatgacagggaataagctggacattggagaagtgcttatccagaacggttgcgccatacgtgaagaccggaagatttagacagatgtaccttatcgactgttagatttttgagatttattgtttatttatttatttaagacattattcgggatgtgaagcagctccgtgcaggcaacaatttgttattcaaagtgctactgggaaaatattaatacccaaaaagatctgaaatgctagtccttgttaaatcaaaaaccacttttttataatttgttttcattttacatgccaaaatgattttttttgtctaatacttgctgaaaaaatacttatcgatgtcttctatgtcattattcttccgtaaaaccaaggcattaattttgacatagattaaatattatgtactaacacttttatattatttgtttattgtaatatcaaaaagttgttggttttatttattgtaaaatgtcttaaaaagttgtgaaaaagaagcaagttattaaatactgactgacttaactctgttactcttaaaaagaaaattattctaaggcttatttatatttatctatgttctttggtagttttgggattgcttttgtacaattgtgattaatcaattatgttccttgtatttatcattatactaatataccattaatgtatgttactgataagtattattatatttatttatccaagcatattttgtatattgatgcttaataatggttgtgataggtgggtattattgttatatatataactttaatcctgtatagtagagcaatgttttattcactcatcccacctcttattggattttttttttaataatactatttatatttaataataccctttgtgattaattattagccgggttattgaatgtctcgtaatctgataccgagcatttgttgaagttttttgttttgtttttctaagtcatttcctgctcaacttaatctaatggactgtttttatatagatattttttaaaaaagtttattatgcattcattgaaccattccggttgaaggttttttttatttatttatttttagtgtagaagaaatttagatactgatctgtaatttttcattccattattattatttttttttttaaattgaggtaaaacaaagaaagtttactattctaattgagaggtcaaaaatacagggtttgtagaatatattacatgtaaaaagaattaaagaaacaaaaaagaaaaattgagcaattagatcctgtgataattatattgttttggtacgaaacgtgaacttaaaagttcaataaaatgtagatgtgccttatgtgacgaagtcaatagaatatatcttattttgttaatagtataagagtttcttattttatttgttatacattattttcttacagaatgttggttaatatattggttaacagcaaaaaaaa

SEQ ID NO: 306 - DNA, 2416 bp, Nezara viridula
attctgggctcaacgctggttttgtctgtgatattggttgttattatggttataagtgtattcctctggtcaaaggcatttattagttaattattgttttgttacgctaatcattaagttgactatggcatggatgttgaagtcattgatagcatttgttgcattgccaattcttagtatttgtgctgcaactatttattactatcatatttgtgataaagaatgggaagaatacataaaaaatatccgaaagaaagaagcagaagttaaaatacctctttcttgtgttggtagtttaatagggagagcaggaactaatataaaagaattgcaagagaggactaaaacaaaaatatttttcaaaaatattgaaggtgatcaaaactacaaaatctgtaagattgtgggtgaaaaggaaaatgtggaagaagcaaaaaacttaattattgagttcattgatcccaaggactcagaagctttagagatgtgggtaccccagagtgctattggccttatcattggaagatgtggtgataatataaggaaaatttctctatctaccaatactaaaattacagtggacaggtacaaagtagcagactcaaataaaaagctcgttgtgattaagggaaaatcacctaatgtggcagcagctaaagaattgattgaaaataaaatcaaagaagacgacaaaaaaataaaagaacttgttgattcaagtcaaacaagatcaccaaggatgaaagcaaagaatcaagaagaaaatgatacaggtttaaaaaaagaaaaagagtctcattacgaaagactgattactgaatcaagtgatagtatgatccaggtttatgtttcatctgtggcttctccatcgcacttatggttgcagctaataacccctagagctgttgatcttgaccatctggtagatgatatgactgaatactataacaaggaagaaaacagaattttgcacaaattgaaagaggttaaaccaggacaaatcgtagccagtcggtttgagcatgacaacaagtggtatagagttgaagtgttttcagttgagatcgacgaaacaaatgaagatgaatgtaaagtagatgttttttatgttgattatggtgactccgcctattacccattaagagacctttatgaattgagacctgactttcttgatctcaaatttcaagcgatagaagtttcaatggctggaattgaatcaaagaacggaggtgaagaatgggacgaaccagccatcgatgcatttgaagatatggtgtatccagcacaatggaaggccatgcttgttcaagttgtcagttataagaaatcaacaatggcaacacgtcctggattaattccttgtatcaggctctactacccggaagggcctccgggtactgacatcggcaagagactagtcgaagaaggttatgcagtagcagttgaaacggaagaacctatagaaacacccaatagtgatgaagactaagtgtattttacgttgttaagttaaaggcttggtgatctcaaatctgtactataatccgggacctgtttctatattataacttaatactttacctcaatcctatgccatccatgagcttacaactaagctctttattgtaatgaatcaagttatctaattttatcttctaaaaaatttcaatgtttattccttgtgattattattaagagagattggtcatagaatgcatatttcctaaaccttggagactgatttatgcaattttatagtcattctgtttatggatatttttcttttccttatttttactgtttaattttatgttaccattatatttctatgtttttcttatagaaaatttctacttgttacatatgaatgtgatatggaatgtatttttgatgcaagaactgcttattttatattgtactgagagtgccatttattttatagctttaagtgtaacgaatgtgtcatcaaacgtattttcgattaaaaaaaaaaacctgtttaagtcatattgtaatattaagaatataatgtaagtaaactggctggttgtaatttacccaagttttattgttaatttataaaattaagagcgatgaatgagtgattttttattttttttttttgcattctaaatttgaatggactcctaattccttcaaatgggtagttatgattataattacaatgtttaatcaaattgtattattaaggtaagagatacactttctggaatttttgacttgtaattatacttgttaaaatataagtgttaatctaaggctaatgtttacatttacgagatcttttttttttacaattttttctcttttgtttataattaaacttaaaattattctcttatttgtacttattaaaaaagaaagaaagaacttaataatgataataaatgca

SEQ ID NO: 307 - DNA, 3823 bp, Nezara viridula
cctaggtggtttctttgaaaataattcaaacagttagttcctgctgttattaatacttttaagtttccatgtactaattgttttcacaaatatccatagaaatgtaattttagcctcgccttttttatattataattataatggatgatgacaagctgaaaatattaaaaactgaagtgacaagtatattaagttcatctggtacaccgctaacagttcgccaatttgtcaaggaatatagagatgtgattggtagaagtttcccatgggcacaatatggttttaaaactgcaaatgattgtttaaaatctatgcctgatatacttacttttaaaaaaaatgagtgtggagacatattggttcctgttcaaagtaattcatcccacataactaaattggttcaagaacaaaaaaagaattcaaaaaaaggtcctatcagaagaccaagacctgtccaacttccaagagatgaccttagaaatgaaataaagccattaaaacagatagaagtgccacagcatcctcttactttcagaggttgggagactcatcaaacagtcgtcccatctttaatgagtatccctacatatcaacatcaacaaaacttttcttatacttctcgcgaatattctcagatgtctcacaatctttggaatatagatcaaatgccacttgttctgaatactttttcaactttgaaaactgaatatactcgtacaaagctacctcttattccaaaaaagtcttccttgaatgaggttcaggagttaaagaaattaacaatgcctaatggctattctactgatggaggcaagagttatattgggagcaaaactaatgaaatttgtgctaatattgaaggcaaatcaagagatgaattatttgagaataattatccaatagagagtcatagtttagttaaagctgacaatagtaaagttgacaatctttcaaaagcttttgataatttagaagatgaagaagaagatagttgtccaattggagaaaaaatgaaagaaaatttcaggaaaatacttaaaaagcataagaatggccttttagtttcaaaacttgcttctacatatttgaaaatgtttgatattggattaaattgtcaagactatggatttcccacaattaaagatttagttatgtcatgccatgatgtttttaaaattcagcaaaagaagcatgccaaggactggttactttttgatgtgaataatgaatcagatgattctactcggtggattccgagacaagttcttgaaaatatgcaagaattatctcttgcaaacccagatggaataataagtgatgatattctgaaacggtataagaaaatgttcaaagttgagttggacgtaaaaaaacttggattcgaaagtgtaacttcatttttagtgaactgtcagagtattgaatgttgtactattgatgatgaatatgttgtatttcccatgaagtggggtaaaaaggtagttgaagagcttgaggattcagctactgaccccttcctttcagtagatacatactctattttctcaaagaagcgttttcaagaaaatgtatgtggttatgactttcaatatgaaaagtgcatcatgcctaaagaagcaatcatgaaagttatagttgcggattgtaatagtcctgattgtttatggctccagactcttgatagtgctgcttcattaaacaatttaatgtatgaacttaacactttttatgatgaagaagaggaacattatatgatgaaagaagacatgattcaccctggcctggcttgctgcattaaattcaatgataaacagtggcataggggaataattcaaaaggttttagaaaactcacaatcagtgaaggtcttatacgttgattacggtacctcttcttgtatcccgtttaaagatttgagaactcttcataaaaagtttgctgaacctcctatatattcattcaaatgtaatatgtataatatcaaacctataaataatgaaacatggaccaaagaatgtctagaattcttttatcagtctatattcaatgaaatatttgttgctgaaatagtggagatcatcaatgaggtagcatcggtgatgttagttgacacaagaggttcagaagattgtgtgataaactttatgttagttgaaaatggttttgctgcttatctggttgataagtcaccaccaccaagtgattattatagatctggaagtcatataccaaacaatcttactgaaaaagaatctaattctgttcgtaagaattctcttggaactcatccagattattttctaaaacttttgccttactggtttaatggtgtagaaagttggaatgatatcaaccatatttttgaacaggctagtcatgaattttttaatgaatcgagtgatgacaatttgactgaaatatttgattatttttcttcaaataagtgtactcaaaacgatgtacttgaattatttatgaagaaaccaaaattaatatgtgatgcttggaatcaaacatattattccttaattgatttatttgaaaacaagttcctagaaaatatacaaactgaattatggagtagcataggttacaattctcaattacaaaatggcaatagcgttataaatcataatacttcagataatgcaattaattcaaatctaaaggcaagctttgaaaaagttgagataagttctaataattcaagtattccaattccccctagccttgctgataagagtgataactatcatagtattgatggatgccattctccataccagtcatattccgagagagaagattattatagtaaaaattgtaataataataactcattgagggatatccatagttcctcagatgttgttaaggatggtagagacccaaaagtcatacctgcaaatttgttcaatacaataatacatttgattagatataattctgagatatatattattatggatgaactacttaccaagtttgcaaaaggtgtaccatcaatgttggccaaacataggctctaccaacatcaaatcaatgtggctccatttattgtaacaccagaccacaaacagctatatgctgaattaaagaggcacagaatcaactctaaaaatggcccagtctctttggtgcccctatcattatccagtgatatattgcttgctgtcgaaccaagaaataaaactgttgcagaagttttgaatgaattaataaatgaatgctattcaagtcatgaattctggtcaacttaaatataatacagtcattttacatttcttacttggtagattaatgatggatacaggaataagctaataataagaattttgtaattaatgtgtttcatgtacatttttttaaaaattgtgttcattgttttgaatcacatggctgtgaagaagtgattgataagataattcttatccttagatgtaatgattttccactaacactttttttgtttgttaatgagaatgttcgacaataccctaatgctaatcttcataatcattcagattagattaagcgacaggtgttcataattaactaatatgccatggaagttttaatgaattaagtttcaaacttagaaaaatacataataatattttttacattttgatgacttttttactaactgataatctagttcaaatagtatttttataataaaataaggatttttttgtttgaaaagaatattttcacatactatttcactatatttgatagtagttatagttttatttttgttacatactttcaaaaaattgattgtaaatattatatccattaaaattgttaaataggtgaa

SEQ ID NO: 308 - DNA, 5128 bp, Nezara viridula
aagaagaggtccaagaggaggcggtaacaagtggggaggtgatggcgacactgaggaaagacccagaagagatggcaatagaagaggaggtggggactggaaaagggaagatggggaagataggagaggcggtggagacaaaaggggacctggaggaggaggaggtggtcgtcgtggtaactggaacaaagaagaaggcggaagtggtggaggttggggaggagataggaagaagaggtttgaaaatgattctgcttcttcaaaaagattttctcaagatactcccagtgaatttagttctggcaagacagctactgacgaagattgggaagctactgagagtgcaccagtggaagcagcaccagctccatctttaccagttagtaatgccatcactgaatacccgatgcataacatccctgtaaatacggaaatgaaggtacacctatcttacatgcagaacccacatgtgttttatgtccaaccggccgggagtgagggagatctcgatgaaattaggaagataattgaagcagaaactgaggcttctcttattcctgtgagagatacttcgctcccgctgggcacaccggtattggcacggttctcattggaccagcttctctaccgagggcttatacagcaggtgttccctccatcctcagctcaagtacttttcattgattatggaaataatgactccgtgctgatgagtgatattttcttggtttcgcctaagcttgctcaaaaagaacccatctctatacgctgttctctcgctgatatcaatcctcccgaagaaggatggacggctgatgcagaagaatattcacgatactttgaaatggaagaacccatgacaatgaatgtcgtctctgtaaagctggtggacggcgaagtagtgatttacgtaaagatggctaaacaatccggggagcaggtttcacagcttcttgctcaacaaggacttgctgttacgactggtaagatttgctcaactaaatcagaagaagctctgccatctgctcctgctcctgtacaaacaatgaccgaagtagtagatacacctgtagatagagtaccagggaaaattaaagaaccattaccagacaaatggattgatcgatttgacctgctagttggccaaaaattttactgttcagtattagaaacagttaaggaaaatctgtttattgtatcaattacggaagctaaggttattacacttgccgcagctttgactgaccaacaacatatccctcttcttcaaccggataccaagctgataatagatgtcaaagcagtccaagaagacagactgaaagttgtattttttaatctgaatggaagtttgatgggtccgaaggaagaaacaaatacacgaaaattgagccccatttgcccgttccctgttgttcggagatcggaccatgtcacagtcacttattgtgagggagctatcgtctacatacaacggcttagtgacgctgacaggctagcacaactcctggatgacatgtacaccttttatgaggccacagcatctgaacctggaacccaatggaggattggagatatctgtgctgctcaatctaatttagattccaattggtacagagccaaagtgatcaacgatgcaaatgattgtaccgtaaggtttctggattatggcagcactgaagagctgccttgcgaaaaccttaggaaattagacgagaagtttatattttctgaaatgtgcttgaatgttacgttgtcagtttactggaggaaccccaaaccacctctactagatgttgtcgagggtgaagagctgtttgccaagtttacaagagatatgaatggccattggatagtagatttaacatttgctaatggagaaaaagttaatcaggagttatttaaaagaaacattgctactgagaaaaacgaatctccatttgatgatcacaatattatcataggatctgatctcgttgctggggattctgtcccgattgtagtctcccatgacgattccatcactatgttttgggctcagttgctcaagcacgttagcaatatcgatgaacttcaagacaagctccataacacgattccaaacctaaatgaaggtagtccggatgagctaaaagtattcactgctcaatattcagaagacagtgtttggtacagggccaccaaggtaggcgacaataccctaaggttcatagattatggtaacacagatcaaattggtggagagataaaagagttaccctcagatatgatgaaaccttcatccggatatgccattccgatgtatttgtgtgttaaaccagtttctagagaatggtctgaaaaagctatacaaatccatcaagcatttattgaaaaacaatcaattctggccaaaataattaatgtagattataaaatagtggtcgatattgaagctgaaggtaagctcctctcggaagcattaattgaagcaggttttgcggaatacaatgattacgttcccgagaacattagaaaatacctgaagggctattctgtccagtctactgctgctgcctctccttctgtaactgcagcaccacttgatacaacgattgataaagtggtcgaaaagcttgttgacgttcaaaatcctaacataaatgagaatgagagagtattcgtagtcttgccgaattcccttaatgattttcacatacatgaagaatcaaagacagacacagttgatgagattcagaacaggcttcttacagtagagttggtgaagcacactggttccgtcgaaataggtgaatattttggggtccagtttgacgaggatggtctctggtacagggcgaaagttttatcgacccagcctcaagttaaagtatattttattgactatggtaatattgttactacttcagatctacgcattcttcctgatgacgtagcatcaataccaccattggcaatccattgtagtctcaatattgaagaaacgccagagctccttgccacatttgtgaaaatcaccaatttcgcacaaactccttttcatattaaattgaagtcttgcggttcgccgcatatagtttctttgttgactgatgatggaaaggatatattagactttcttttatctcacataaaatcagatttacctagcccgtcacaattgctgaaatcgaaagaacagtcactgaaagatatagaagagttggagttgttagaagcctcttcgcactcattattacaagatgagatgaaggaaagtttaaggattacgatggaacttttggaaccggaattgaatgttgtaaaacaaggttatatttcacatataaactcaatcagcgacttctacgttcaagaaatcagtgttatgactgtcctggaccatattacggctatatattcggtctttgacgaacagatcagaattaaagaaaacttcaaagttggcgaattagtttccgctaaatataatatggatgacagttggtgcaggggtatagttacacagaaggagcccgttgtgactgtccaatttatagattatgggaatgaaaatgaagttagcgaagtctacgaacttccagacatcttgaatctcgaacagctcgctccagtagccattaagtgttgcctatctgtcaaagatgttgctattcatccaaaggttgaagagaagtttttagaaataagtggaggcggttcgactttatttgatttcaaaatcttatcaaagactggaaatttaaaaataatcgagcttatggttgacgatagaaatataatgttggatctgacagaagatattactgataatgaagaaaagagagagacatcagagattatagaaaaacaagaatcaactcctggtgataaagaagtcgctcgaaacactgctgtagaaaacattgataatgatacatctaaaattgttgagaatatgaactctgcttccccgcttgctgaagatattttagagaacccaaaagaatctgctatctcacctgcggagtatatttcagaggctgtagaagaatctatcatgtcaccttctgaatctattttagagaccaaggaagaatctaccacttcgtctactgcacctactgtagagacaacaaaggaatctgcagagattgtgactgagtctcctacattacctagtggaacaatatcagagaccgtgacagaatctgctgagtctatttcggagatcaaggaagaatctgcatctgagcttgtttcagagactaaaacaaaatcagataccccatctgctgttcctgttctggaggctgcgctagaatttgccgccacacctgagactatggaagaatctaatccctcatcttctgaacctagttcaaatactatggacgaagataaaaattgtgatacaaattcagaaatcagccaggataataatatcgtcgacatctcgttctcgaaagatattgatgaaagcaatgtcattcctgaacatgaaacaatcctatctggcgttgagagctctgataaaacagttaataatgaattggatgtttcaatcaaacctgttaaagaacctgagcaaactataagaaataaaagtcctgcaaaagaggtaattgtggctaacggaagcccagctaaaaaagttcccgttagtaaaccagttaaaagtgttgcagaaatcaaagcctccgccaaatctaggatagcgactggattgtcaagaacaccggatagattatccactgcgaaggcgtctgctccagtaggcaaagtaaagtcagaatcgcaacttgatgtagtttcgtcaacagtaagcgattcaaatgccagaaggccatctataccaagaacgaaaagtttgaataacgatgaaaagcttgtctctggcagcctatcgccatctcctcgaccgcgccagtctaaagctgataaaatagtaccaggtgccatatcaggcaatactttgccccattcagacgaagactagtatatgttgctacaagcgggagagtggtttataagtggtgcgaaaggtgatattgttttgtttcccattttatatttatatataagagttattttctaattattgtgtacatagatatattatttttataccaatattgttagagaagtt

SEQ ID NO: 309 - DNA, 1421 bp, Nezara viridula
aaacagtgatgggtcattctcttgcaggtttcttattgtaatttagggttttagattttttattttttttatcagacgtgaataattaatgtattttaagtttatgattttatttgtgttagaaattagtgttcactgctaagtataagttttttaccgtttgactaagtcataaaatgacagtgaaagaaatattattgttgaatggtgggattgtggcaggatatattttttacaagtattatcagtataaaaatactctgaaagagattcagggattgatcagcaggaaaaaacattctgtaaatactgccttgtttttttgtgcttctggtcttggagactgtgataaacatatctataaaaagaaaatgtgtgataaatcagactgtccatacaggaaattaagttgcatcatggactgtctcaatagcagtagaaaaacattagatgtatgtattcatcttctgacaagcatggaaatagccaattgtattatcgatgcacacaaaagaggagttaaagttcgtgttgtttgtgataatgaaatgtctaccaacaaaggatctcaagttcgcattattaatcaatgtggtgtgaacgtgcgcatacctcttctcaattaccatatgcacagtaagatagcaattattgatggatggaaagtgatggcaggttctgtaaattggactgttcaaggaatgtacggcaactgggacaatctcgtcatcacttcacaaagagatattgtgaacgatgctatggagacttttgatcttatatggagtagctttgatgcaaacactataatatacaaagttcctaataggaaaaagtacacaaaacataaaccatataattcaaacaataaatatcagcagaagagctcaagatctaattataattattatcaaactaataattattagtacattgttataatctttttaagagaaaattgatctcaattttattattaactgcttatggatgtatggacactgaaccattgtaatttaagatgtactgtccaagcacaaacctttaattttttaaaagcattattaactgatatctttcctacatgttgagtgagaatggttgaaagagttttgataaagagatgggtattgaatgtgaaaattgaaaattagacaatataattaattaatacaacatgaaaattataaataatcactgtaactgaatttttaatggtgtccatacgttagtggtagtgtatatatatattaatttaaatttcatttttagacaaaagaaaattactgtttttagtttttaatatttgctttcttttataattttcttatgaaaggattgctaagtcaatctaacattcaaggcatattggacaatacaataaaattaacatggtataggtatttatatatatatatata

SEQ ID NO: 310 - DNA, 926 bp, Nezara viridula
aaataacctctttggttggatagctgtcttataacctttttccgccatactttgacttgggaaattgagtaattctgtttcaggatctttgtgcttttagttgtagtcaatgtttcagatatatttttagccaaatgaattattctaaccgtagcttatggctcttgggactttccacattcggcactgtttgtgtaataggcatttttaattacaaatttaatcagtggatgaggaaacgagtaaacaagataaagaaagacaaccaaattgatatattgaataaaaatcgccttttaacgtttggtgtgagcagtgatcaatgtgatgggcacatgaagagacaatttgattgtggcaatttagattgcaactatggacgtttgagttatatactaggatttattaataattgtcaaaaaaacttggatgtttgtatatacatcatcacagctaaactgtttggagattgtattattaatgcacaccggcgaggagtcaaggtgcgagtcatagcggatagtgacatgtcattttcagctcaatctttgataaacactttcagggcaggagatataccaacgaggcagagaatgtctccattcattatgcaccacaagtttgtgattgtcgacagtgaggtactgattaatgggagtatgaacttcacaatgaccggagcgttttgtaattgggaaaacgttatgataacaacgcaaccggaactagtcaattcctttcagaaagctttcaattctctctgggaagatttttcacctcttaattattctcctttagatggaataataaaagctcaagcgcctcagcaccaagtggctaatgtataaataaccttaaatgtatttgatttacattttaaatgtaccatatttatgtatttttataaaaacattgattgaaaaaaa

SEQ ID NO: 311 - DNA, 2309 bp, Nezara viridula
attacactaagctggatgatttttgaaactgtaaaagaaggaggtttcaaatatttaaattttccattaagcttcaatattttttaaaatatgagaattggtatttaatttcttattaagtttccaattaggccggaaaaactgtgtttacttcaatatggttatcagaactcccttatcattactaaaattcacaatagtgatacgttcacattatgctttacagaaaaacagcatcagtcattgcatcatagcccgtagtattcaaaatattaaaaaaaatcctattttaagaaataccttcaaaagtaatactttacgagtacctgtgagtatagcttgcttttcagcgactgctttggctgtgaaatctccttctattgaaaaaataattcctgaaaaaaaggaagtgataagacaaacaagttctttgtattggaggcgtttgttaaaattgatttattctgacatctggctttggttgggtgcacttgtggctgcattgggcgtagcctatattaatattattatacctattagtttaggtaatgtagtaaacataatatcaaccggagaagggcacgaatatattcctcttcgttgtctaaaactaattggtttatatcttgctcaaggatttggaactttttgttatattgctcttctctcttcagctggagagagaatggcattcaaactgcgaaaggaattgtatcaaaatttaattaaacaagacatggaattttttgactctataagaactgctgagcttcttgaatgtgtgtttactgatgttcaagaatttaaaagttcttttaaacagtgtgtttcccaaggtgttaaaaacatttttcagatatgtggaagtattatttcattaatcaagatatcaccaggtatgacattgactattgtcacagttgtaccacctgttgttattcttgggacactatttggtgctctgcttagaaaactatctactgctgcacaaaaacagtcagtcaaagtattcacactatgcgaagagactttaagtaatatacggactgtgcgggcttttggaaatgaatctttagaatgtgaaagatttgcctgcgaaaccaaagaatcatctaaactgaatacattgcttggccatggaatagcttttttgcaggctggaagtaatttatttttgaatggtttggtactaggaaccctctatattggaagtcagtttattataattggaaatttttcttctggaaatttaatgtcatttctagtcactgcgcaaatgatacaaaaatcgtttgctcagatatctatgacatttggtcactatctaaaaggaaagcagtcatttgaaaggatttgctattattctagtttggaacctttgattccaactgaaggaggactaaaaattccttaccattcttttattccaaatattgagttcaaggatgtaacatttgcttatccctctaggccaacacaggcggtactaacaaagttgaacttattattaccagctggaaaaacagttgcagttgtaggggcttctggaaatggtaaatcaacaattgctcttcttcttgaaaggttttatgatgtaaacagtggttctattacaataggtggtgttaatatttctaatctggatcccaactggctcagaagttctgccattggcattattaaccaagaacctgttctgtttgccacaaccatcaaagaaaatattaaatatggaaaacctacagccacagatgaagaagtttatgaagctgccaggttagcaaatgctgatgaatttattaggagctttccaaaaggatatgaaactatagttggtgaacgtggtgttgccatatctggtgggcaaaaacaaagaatcgctatagctagagctttgattaagaagcctgctattttaattttggatgaagcaacaagtgctttagaccctgaagctgaaaaggtagttcaaaaaactttagaaggaatttgtcaaggtaggaccgtattagtaattgctcataggttgtcaactgttaaaaatgctgatacaatagcagtgcttcagaaaggagtgattttagagatgggatctcatgaatttttaatgaataagaaaggtgtgtattaccatttaatgaatcaagaaaaccagaaatcaaggaattatggctaatttttattttgttattttataaaataaatgtttcaattttagttttgatgtttaaattagatggtttatttaatgaagtgcttaaattaagttttaaatagatttgtaaataaattttgtatttaattttttt

SEQ ID NO: 312 - DNA, 1615 bp, Nezara viridula
ggatggcgaaattgcagacaaaagcttttagtaaaatagtttccatggacataagttggtttgaccgaaaaggaaactctcctaacgaatgccttgaaatattgaccaacagtccaccgctcatcaaatctgtgacaggagacagggctgctcaagttatcatcttcgtgctttcgatgctatttggcgttgtatattcgttcctggtcagtgccaggatcacaatggctaatgttccaatcttcattgtcttctttatcatcaactattgtagaattaagtcgagaaaagctgacgctaagtctgcctccatcttaaccaggtcgactaagatagctactgaatatgttcaaagtgtcaggacaattcaaattcttaactgtcagaagcatgtagtaaacgggtatcaggatatgctggttcgtgctaaaaaggaagcattcttaagtattggatggtttgcagctgtttataccttttctggagcgttgatacgattgtcgatgggcgtgttatttgtttatggagcccatataattgcgaatggtagtgttaaaggaacatcgcttgttggggttatatttacattaatctcggtcgcttcgctgactgggcctgccttgattttgatgagccagtacccagcagccaggcaagcgataaatcaactctacagaatcgccaatactaagaccattctcaatactttgacagatcagggaatcaaaccagaaataagtggaaacattgaattccaagatgtgatgttctcttatccaacaaggaaaacagtgcaagttctcaaaaagctgaacctcaagatcgaagcagggaagacgatagctctagtaggggactccggttgcggcaaatcgactatcgtctcacttctggagaggttctatcttcccaatgaagggaaaatattgatcgacgtcaacgacatcaatgatataaatgtcagatatttaagaagccaaatgggtcttgtttcacaagagcctgtcttatttgacatgacaataaaggaaaacatcctttacggtttggaagaaaaggttacaatggacaagatcatcgaagctgcgaaaatagcaaatattcacaactttataacgaaacttccccagggttatgacacccaagttggagaaaggggttcgaagttatcaggtggacagaagcagaggatcgccattgctagggctgtcctcaggaatccgaagatattacttctagacgaggctacttctgcgttggatacagagaatgagaagacggtacaggaagctctggagaacgcctctgtcggtaggaccactatcgtgatagctcacagactgtcgacgatccgtaaggcagacaagatagtggtcatccagtctggtgtggtagtagaggaagggaaccacgaacagctgatggagaggagaggccactattaccatctgcttagtagataatttattatctgtgtctcaacgaactgcatttttaatcacatatcattatctttaatcacactaaagatactatataatataatacaaatattttattgttagcaattctagtattaaactaattgtatgaccccttctctgcatagagtatt

SEQ ID NO: 313 - DNA, 4053 bp, Nezara viridula
ccttagtcaggttcatttcgagtgtagttcaagaaggagtcatcatgagcgaccagaacttcagagattccgaagtggacagtaccggcctcttccccatcccgggaaatattggcaacatgtcgatgaacgttcacattcaaacagaagagacagatttcaaggtaaagggaaacaagaaacggaaagcgaagaaaaaaaagaaagaaacccctggaggagaaacatcaggtatcgcgggtttgttcaggtacgctaccgccggggatataacgctgatggtgatcgggtttctggcttccatcgtcaatggcgctgctcttccctttctggccgtcctcttcggtcagatgacgaacatgttcaacaatgtagccactcacggctttaaagatgagataaattcaacaatgaatcgtgacgtcttctcagacatttcgatacacgaaacaccctggacaaccggaaatggctccgatgtaagaataactagaaatgaattcacaacagcaatggcacatttctccatgtattacatctacgttgcttgcgctgtgttggttgcagtatttatacagacattgtgttgggaaagcgcttgtgagagacagatattcaggctgaggcagattttcttttctcaaattctaagacaggatatcagctggtatgacgaaaacgaagatggcgatctgcctcacaagttgtctgatgatttggaaagaataagggaaggtatcggaagcaagttcagcatgttgacgcagtactcttcgactttcataacagggatagcggtcggcttccacgctaacaccaagctcacgtcggccatgatagtcattgctccgctggttatcggcatgtcggccgttgtagctaaggcgatgagtgggtccgctgccagagaacagatccgctatggcgtcgctggagggatagccgcggaggtcatcaacgctgtgaagactgtcgcttccttcggcggagagcccagggagataaagaggtatggcgaagcattggaagaaggcaggaagataacaatgggaaaatattacgtgctctcggtagcggcggccatgatgttcgtcgtctcttacggtgctttcgccttcgccttctggtacggctcccagctgctcagtcgtggcgatgccacagctggtagtatatttacggtatttttcagcgttatgacaggagccttcaccgtcgggaacgcgctgcctttcgttaacacggtgagtacggccataggatctgcgtccactatcttcggcatcatcgacaggactccccccatagactcctattctgcagaaggaatggtccctgataaagtggatggcgaaataacattcaaagatgtccagttcgtttacccgactagacctgaagttaaggtccttcgagggttgaccatcaccattcacccaggaacatccgtggccctcgtcggtgccagcggggcggggaagagcaccgtggtggggctgctgcttcgcttctacgaccctaatggcggagaggtcctcttggatgggactaacgtccaagacttcaacctggcgtggcttcgaagccagatcggtcttgtgtcgcaggagccggtgctcttcggcgtctccatcgcggacaacatccgctacggcagggacaatattacggaatacgacatcgtcagagctgccaccctggccaatgcacacagcttcattaaggatcttcctaatggttacgatacacaagttggggacaaaggcaccatgatgtccggaggacagaagcagaggatcgccatcgctagggcactcgtcagggaccctaagatcttgctcctcgacgaggccacttccgctctcgatgctcacagcgaaggcgtcgtccaggccgctttggacaacgccatgaggggtcggaccacggtcatcatcgcccacaggctgtccaccataaggaatgtcgacaaaatatacgctttgaaggacggtcaggtatttgagtctggtagtcatcaagaattgatggaaaaagaaggactttaccacagcctagtgatggctcagaagaaaagagatcagagaagccagatttctgaaaatgaaggaccagctgaaatagaagctactgttgagcagcaaacgattcccattgaaaggaagaagtctggtttcttttcaaggatatctttaagaagaagtagatcttcagccacatctttgaagaatatatttattggaaattcaaatgaagatgaatcaaaagaggaactcgctaagagggtgagcttctatagaattttcatgatgaacatcacggaatggccttttatgttactcaccgttatcggatgtatcattgtgggcacaagcatgccgctattttcttcattttatgctgacgtcttccaaacatttacattaactggtcaagatttcgcaagtgccgttattttttggactggggtgtacgtctgctttgctcttatcgctggttttggtaattttctagcagctatatgttcttcaatattaacggagaaaatgattgccgttatgaggcttaaagctttcactagcatagtccggcagaccatcgggtggttcgatgctgagtcccacacagctggtagattggtcacttccttggccagggaccctcctctcatcaaagccgccgctggtttccgagctggtcaagtattgattgcggctacatcattgattgctgctttggtgatcgccttttccacaggttggaagttggcctgtattcttctagtagtcgttcctattatcgctggagcagcttacaagcaggctagtctactcaggcgacatcagaagagagatgctaaatttatggatgatgctggacaggttgcaaccgaaggagtattaaacttgaaaactgtgcaagcccttggaaaggagaagctttttataagcagatacaaaaaatgccttgatctaccctacaaagaatcaaaaaagcaagcttatgtttatgcaatggtgtttgccatttcacaggcgatgatttatgtaatgtatgctgctgcttttagatttggtgctaagctcatttctggaggtgaaattaagctcatttctggaggtgaaatggatcctactcaagtttacagagtattttttgctctatcattttctgcgacagcgataggccaagctgcaacttactttcaagactttgctaaagcaaaactttcgatcggttttgtctataggttaatgaacctagaatctgatgttgatccattagactcatctggaatcaaacctgccattcaaggcagagtgacatttagagatatttatttttcataccccacaagaagaaacattcccatcttaagaggtctaaacctgacaattgaaccaggtcagactgttgcactcgttggaggatctggttgtggaaagtccacactcattggtctattggaaaggttttacctaccatcaagtggaaaagtgctaatagatgacgttgacataacaacagtaaatttaaaatggcttcgaagtcatattggtttagtgacgcaggaaccagtcttattcgactgttctattaaagataacatagcgtatggtgcagcagaacctcatctggttaaacacaatgacattatagaagctgcaaaaacagcaaatatccatgagtttatcataaatttaccacagggctatgataccccagttggggacagaggagcaaaattatcaggaggtcagaaacaaagactcgcaatcgctagagctctgataaggaatccaaaaatccttctacttgatgaagctacgtcagcgctggatacagagagcgaaaagattgtacaagaggctttagacagagccaggaaagggcgtaccagcattgtcatagctcatcgattgtccacaatacagaatgcggatgtgatagcagtcatccataagggaaaggtagctgagaaaggaactcatgaagaactgaaaaaatttggagggctgtattttgaacttataaaataccaataattttaat

SEQ ID NO: 314 - DNA, 4101 bp, Nezara viridula
taagtgtaccgaggttcttcatcatcatcaacatgcccaacaaccacagaggcaacgaccagcttggtgactactctagagtcccagcaaagcttccggaagatgagtcttcagaagttcttctttcttcatctcctccctccaaggccaaaatgagaaaattttccacggattctcactctggcaacgaggaacaaagtctttctgcatcgcaaacccttgataataaaatgaagaacaagaacttgttgaggatttggaacaaaactgaaacagtctacgagatcgaaaaaaaaataaaagaaccaggaaaactaaggacaatcttgaaaactttacgctacgcgaagaagaaagacaagattaatctgatgctgagtgtcttcttggccatcagtgtcggtttcatcggcccattcaacacttacgcatttcatacaccggttctaactgtattcattaaatctgagactgtagggaatccttataatattaatatgactgaggagattcctatgatatcaacgatgggttatggatacctcttgagtgcaggagtcacaatcatacttggtatagctgagatcatggcttgtgaattagctgctcgtaacataatggccagagttaagacagcctacttatcaaagatgctgtctatggagattggctggtatgataaatcagaagaacagtttgtgaatactgtggtacatgacttgcaaaagatggcggtattatttgacagtaaaatgattaatggagtagaaatgttttcagcattacttttcggtttcctggctggcctcctcctttcttggaaggttgcgcttttgacacttgtaactatgtcaattgctatctcgatcttatacttattactacaagcatccaaaaagaagggaaaatcacagcaccaatacgtaacaaattgcacgaaaattgcctctgaagtacttggaaacccctgtacagtcgctgcgtatggaggagaatttaaagaaattgagaggtacaaaagtacattaaagatggcaaataagattgaattacaaaatactgcagtgatctctgcagggaaaggattcagttatttctttttgtgcatttgctatttggccgcttattatttttgtgtatggttatatctttgggatgactttaaccctggatacctagcagttcttttaccagcacaaataagcgctatttaccatggcacatatttgctcagtactatttctgatctcaatgtagcaacagattcagcatacagagttatgaggtttcttgatactgagaccagctataacaaatcaatcaaacaaggcatcgaacctgacacatttaaggctgatgtctctttcagaaacgttcagttctcctacccaacaaacttacaaacaaaggcgctccaagatctaacattggatattgagcttggtaaagtcacagcagttgtaggaactagtggtgccgggaaaagtacaattgtaaacctgatttctcgcctttatgatgttaatgatggacagatcctaatcggaggagtggatataaagacattgaatgtcggttggctgagaaatcatattggtgttgtgaggcaggaacctacgctcttcgatactacgatagaagagaacataagatatggaaaaaccaatgcatctttggaagagatcatggaagcagcaaagatttcgtatgctcatagctttatagagaaattgccttcaggctatgattcaattgttggagaaagaggtataaaactttctggaggtcagaaacagaggattgccattgcaagagccatcgtcaggaagccaaaactgcttcttcttgatgaagccacttctgcacttgattatcattcagaggctattgtaaaagaagcgcttgataatgccatgcgtggcaggacaaccttgatcattgctcacagaatgtccaccgtgaggaatgctgatgttatatatgctataaaagatgggcacatcgttgaaaaaggctcacatagcgaactggtggaacttaaaggatattactactctttagttaagattcaagaacttgaggaaaaagacaaagctgtagcactaaaccaaaaaattgatactaaagaagaattgataaacgaagccaaaacatccgctaaagaacatttggaggtgtcccagaacaacgaaatacattggctgagagtgataaaacctaaagtaatttttctgtggttcttggccgttttttttactgtcattacttcaacatttcttccaatttttttccatatatttggcctgctttgcaagtctttcacgtacagtaaagatgaagtgagtcagattgctttgatagatgttacttatctccttggattgggcatcacagcttttttctcagtggttctgacaggtgtgacatcaacaatttccactcaattatggatggcgaaattgcagacaaaaacttttagtaaaatagtttctatggacataagttggtttgaccgaaaaggaaactctcctaacgaatgccttgaaatattgaccaacagtccaccgctcatcaaatctgtgacaggagacagggccgctcaagttatcatcttcgtgctttcgatgctatttggcgttgtctattcgttcctggtcagtgccaggatcacaatggctaatgttccaatcttcattgtcttctttatcatcaactattgtagaattaagtcgagaaaagctgacgctaagtctgcctccatcttaaccaggtcgactaagatagctactgaatatgttcaaagtgtcagaacaattcaaattcttaactgtcagaagcatgtagtaaacgggtatcaggatatgctggttcgtgctaaaaaggaagcattcttaagtattggatggtttgcagctgtttataccttttctggagcgttgatacgattgtcgatgggcgtgttatttgtttatggagcccatataattgcgaatggtagtgttaaaggaacatcgcttgttggggttatatttacattaatatcggttgcttcgctgactggacctgccttgattttgatgagccagtacccagcagccaggcaagcggtaaatcagctatacagaattgccaatactaagaccattctgaacactttgacagatcagggaattaaaccagaaataaatggaaacattgaattcctagatgtgatgttctcttatccaacaaggaaaacagtccaagttctaaagaagatgaacctcaagatcgaagcagggaagactgtagctctagtaggggactctgggtgcggtaaatcgactatcgtctcacttctggagaggttctatcttcccaatgaagggaaaatattgatcgacgttaacgatatcaatgatataaatgtcagatatttaagaagtcagatgggtctcgtttcgcaagagccagtcttatttgatatgacaataaaggaaaatattctttatggtttagaagaggaaatcacaatggataaggtcattgaagctgcgaaaatagcgaacatccatgactttataatgaactatcccaaggcttacgatacttcagtcggggaaagaggttcgaagttatcaggtggacagaagcagaggatcgccattgctagggctgtcctcaggaatccgaagatattacttctggacgaggctacttctgcgttggatacagagaatgagaagatggtgcaggaagctctggagaacgcctctgtcggtaggaccactatcgtgatagctcacagactgtcgacgatccgtaaggcagacaagatagtggtcatccagtctggtgtggtagtagaggaagggaaccatgatcagctgatagaaaggggaggttattattgtaacctgctcagtagataatatatattatctgtgtaatgaatattgtaaattatcagagtattcgtttttcggctactcacagacaagacagatatgctgcccccacagtgttgccgtttgtacgaggttcctcgtatttgtacgagattgtgacgtattgtacgaggtaagagtatcaaccagcctcatacctcgtacataattttgc

SEQ ID NO: 315 - DNA, 1966 bp, Nezara viridula
aagaacttgaagaaaaggacaaagttgttacaataaatcacaaagatgtatctagagaggaatcggttgaagaaactataccatttgttgaggaaaatatggagttttcacaggataagaaaaaactgcgactgacaacgaaaaacattaaaatgatgttagtatcgttcttcgccattctgttcgctaccattacgtcaacatttctttccatttttcactacatatttagtttgttatgtcagtcattcacgtacgccagagatgaaataatgcatgtagcaatggttgatatcggttatctctttggactggccgtaattacattcttctcagtgattttttctgatgtgctttcaactattgcaactcaaatatggttgggaaaactgcagaaaaaagctttcaataaaatagtttctattgacataagttggttcgactggagaggaaactctcctaatgaatgccttgagataatgaccaatagtccacctctcatacaatcagtgacaggagatagtggagctcaagttgtcatcttcatgatttcggttgtgttggctattggctattcgttcttcataagtactagtgtaacattggcaaatttaccaattttcctaacattcatcatcatcaactgtttgagattaaagccaagagaagcagacgctcggtctgcctacctcacaaccagatcgaccaaggttgctacggaatatgttcagagtgtcaaaactattcaaatacttaactgtcagaaatatgttgtcaaccagtatcaggatatgctacttcggtctaagaaggaagcatttgtaagcattgttttgtttgcggctgtttacgctttttctgtatcattgatccggtcgtcgatgggcgtattatttatttatggagccaatgtaattgcgaataccaatattcgtggaacatcacttcttagtgttgtatttactctaaactcggcatctgtcttgactggacctgccttaatcttgataagccagtaccccgcagccaggcaggcgataaggcaactctacagaatctcctatgcgaaaaattctcttaatatattgacagatcaaggaatcaaaccagaaataattggagacatcttgttcaaagatattacattctcttatccgacaagggaaaaaacacaagttctaaagaagatgaacctcaagatcgaagcagggaagacgatagctctagtaggggactctgggtgcggtaaatcgactatcgtctcacttctggagaggttctatcttcccaatgaagggaaaatattgatcgacggtaatgatatcaatgatataaatgtgagatatttgcgaagtcagatgggtctcgtttcgcaagagccagtcttatttgatatgacaataaaggaaaatattctttatggtttagaagaggaaatcacaatggataaggtcattgaagctgcgaaaatagcgaacatccatgactttataatgaactatcccaaggcttacgatacttcagtcggggaaagaggttcgaagttatcaggtggacagaagcagaggatcgctattgctagagctgtcgtcaggaatcctaagatattacttctggacgaggctacttctgcgttggatacagagaatgagaaggcggtgcaggaagctctggagaacgcctctgtcggtaggaccactatcgtgatagctcacagactgtcgacgatccgtaaggcagacaagatagtggtcatccagtctggtgtggtagtagaggaagggaaccacgaacagctgatggagaggagaggccactattaccatctgcttagtagataatttatttatcagctgtttcggaccaaattgcattgttaattatatttaatttgattacatataatgaaaatattttattttctttggttatttagttttagtatcagtgatatctcatgtcaaaa

SEQ ID NO: 316 - DNA, 1602 bp, Nezara viridula
ggatggcgaaattgcagacaaaagcttttagtaaaatagtttccatggacataagttggtttgaccgaaaaggaaactctcctaacgaatgccttgaaatattgaccaacagtccaccgctcatcaaatctgtgacaggagacagggctgctcaagttatcatcttcgtgctttcgatgctatttggcgttgtatattcgttcctggtcagtgccaggatcacaatggctaatgttccaatcttcattgtcttctttatcatcaactattgtagaattaagtcgagaaaagctgacgctaagtctgcctccatcttaaccaggtcgactaagatagctactgaatatgttcaaagtgtcaggacaattcaaattcttaactgtcagaagcatgtagtaaacgggtatcaggatatgctggttcgtgctaaaaaggaagcattcttaagtattggatggtttgcagctgtttataccttttctggagcgttgatacgattgtcgatgggcgtgttatttgtttatggagcccatataattgcgaatggtagtgttaaaggaacatcgcttgttggggttatatttacattaatctcggtcgcttcgctgactgggcctgccttgattttgatgagccagtacccagcagccaggcaagcgataaatcaactctacagaatcgccaatactaagaccattctcaatactttgacagatcagggaatcaaaccagaaataagtggaaacattgaattccaagatgtgatgttctcttatccaacaaggaaaacagtgcaagttctcaaaaagctgaacctcaagatcgaagcagggaagacgatagctctagtaggggactccggttgcggcaaatcgactatcgtctcacttctagagagattctatcttcctactggaggaaaaataataattgatggaaatgaaattaatgatattaatgtaagatatctaagaagccaaatggggctcgtatcgcaagagcctgtcttattcgatatgacgattaaagaaaatatcctttatggcttagtaggagagattacaatggataagatcattgaagctgctaaaatagcaaatattcatgactttatcatgaagcttccacaggcttatgacaccccagttggtgaaaggggttcaaagttatcaggtggacaaaagcagagaatcgccattgccagagctgtccttaggaatcctaagatattactactggatgaggctacgtctgctctggacacagagagcgagaaggctgtacaggaagcattggagaacgcttctgtcggtaagacaactatcgtgatagcacatcgactttcgacgatccgtgaggcagacaagatagttgtcctacagtctggtgttgtcatagaggaagggaaccatgaacagctgatggagaagagaggccactatttcaacctgcttagcagatagttgtattatatataatgtatataattcaattacataagatgtaaatattgtatttttaatatgatattatttatagtattcatttttagtattatataaatgtccaattttcctctttttttttaaattttcattatca

SEQ ID NO: 317 - DNA, 1858 bp, Nezara viridula
ggatggcgaaattgcagacaaaagcttttagtaaaatagtttccatggacataagttggtttgaccgaaaaggaaactctcctaacgaatgccttgaaatattgaccaacagtccaccgctcatcaaatctgtgacaggagacagggctgctcaagttatcatcttcgtgctttcgatgctatttggcgttgtatattcgttcctggtcagtgccaggatcacaatggctaatgttccaatcttcattgtcttctttatcatcaactattgtagaattaagtcgagaaaagctgacgctaagtctgcctccatcttaaccaggtcgactaagatagctactgaatatgttcaaagtgtcaggacaattcaaattcttaactgtcagaagcatgtagtaaacgggtatcaggatatgctggttcgtgctaaaaaggaagcattcttaagtattggatggtttgcagctgtttataccttttctggagcgttgatacgattgtcgatgggcgtgttatttgtttatggagcccatataattgcgaatggtagtgttaaaggaacatcgcttgttggggttatatttacattaatctcggtcgcttcgctgactgggcctgccttgattttgatgagccagtacccagcagccaggcaagcgataaatcaactctacagaatcgccaatactaagaccattctcaatactttgacagatcagggaatcaaaccagaaataagtggaaacattgaattccaagatgtgatgttctcttatccgacaagaaaaacagttgaagttctcaaaaagctgaacctcaagatcgaagcagggaagactgtagctctagtaggagactctggttgtggtaaatcgactatcgtctcacttcttgagaggttctatcttcccaatgaagggaaaatattgatcgacgttaacgatatcaatgatataaatgtcagatatttgcgaagtcagatgggtctcgtttcgcaagagccagtcttatttgatatgacaataaaggaaaatattctttatggtttggaagaagagatctcgatggaaaaggtcattgaagctgcaaaaatatcaaacatccacgactttataatgaagcttccccaggcttatgaggcatttgtcggagaaaggggttcgaagttatcgggtggacagaagcagaggatcgccattgctagagctgtcgtcaggaatcctaagatattacttctagacgaagctacgtcagcgttggacacagagaatgaaaaggcagtgcaggaagctctggagaacgcctctgtcggtaggaccactatcgtgatagctcacagactgtcgacgatccgtaaggcagacaagatagtggtcatccagtccggtgaagtggcagaagaggggaaccatgaacagctgatagaaaggggaggttattattgtaacctgctcagtagataatatatattatctgtgtaatgaatattgtaaattatcagaggcggattcgttttacggatactcacagacaagatagatatgctgccccgagtgttgccgtttgtacgaggataatcgtatttgtacgaggttgtgacgtattgtacgaggtaagagtatcaaccagcctcatacctcgtacataatttttgctaaagtatccaaagttatatttttataaatgaagtttagatttattttacaattatttttagtgtgttattatttatattgatatgtaatactgaacttctgttgctttagagacagataaattgcaactatatcttctttaattagagtatgattattatttctttcataaacccattattgtatatgcatgattttttttt

SEQ ID NO: 318 - DNA, 3365 bp, Nezara viridula
taacagccagaaaaaagttatatttatttccagaaggttttgacttgattaaattacttaacgaactgcgattaattctaactttagtttatgttagcaatagaacaagttaagtgactatgtgattgaaattgtgtacaatggtctgaatttttaaaagttttgaattcgaacagaaaatattcagttcagtttataagaaaaatattttggcaactggagaaaaattacccgattcccactctggcaacgaggaacaaagtctttctgcatcgcaaacccttgatattaaaatgaagaacaagaacttgttgaggatttggaacaaaactgaaacagtctacgagatcgaaaaaaaaaataaaagaaccaggaaaactaaggacaatcttgaaaactttacgctacgcgaagaggaaggacaagattaatctgatgctgagtgtcttcttggccgtcagtgtcggtttcattggcccattcaacacttacgcatttcatacaccggttctaactgtattcattaaatctgagactgtagggaatccttataatattaatatgactgaggagattcctatgatatcaacgatgggttatggatacctcttgagtgcaggagtcacaatcatacttggtatagctgagatcatggcttgtgagttagctgctcgtaacataatggccagagttaagactgcctacctatcaaagatgctgtctatggagattggctggtatgataaatcagaagaacattttgtgaatactgtggtacatgacttacaaaagatggcggtattatttgacagtaaaatgattaatggagtagaaatgttttcagcattacttttcggtttcctggctggcctcctcctttcttggaaggttgcgcttttgacacttgtaactatgtcaattgctatctcgatcttatacttcttactacaagcatccaaaaagaagggaaaatcacagcaccaatacgtaacaaattgcacgaaaattgcctctgaagtacttggaaacccctgtacagtcgctgcgtatggaggagaatttaaagaaattgagaggtacaaaagtacactaaagatggcaaataagattgaattacaaaatactgcagtgatatctgcagggaaaggattcagttatttctttttgtgcatttgctatttggccgcttattatttttgtgtatggctatatctttgggatgactttaaccctggatacttagcagttcttttaccagcacaaataagcgctatttaccatggcacatacttgctcagtactatttctgatctcaatgtagcaacagattcagcatacagagttatgaggtttcttgatactgagaccagctataacaaatcaatcaaacaaggcatcgaacctgacaaatttaaggctaatgtctctttcagaaacgttgagttctcctacccaacaaacttacaaacaaaggtgctccaagatctaacattggatatcgagcttggtaaagtcacagcggttgtaggaactagtggtgccggaaaaagtacaattgtaagcctgatttcctgcctttatgatatcactgctgggcagattcttattgggggagttgacataaagaaactgaacgtcagttggttgagagatcatatcggcgtcgtatcacaagaacctatgctctttgatacttcgatagaagaaaacatcagatatggcaaaactgatgcatctctggaggagatcgttgaagcagcagagatttcttatgctcacaacttcatagagaaattaccttcgggctacgattgccttgttggagaaagaggtgtaaagctttctggaggtcagaaacagaggatcgccattgctagagccatcgtcaggaagccgaaactgctccttcttgacgaagccacttctgcgctggactctcattcagaaggcattgtacaaaaagcccttgataacgccatgcgaggcaggacaaccttgatcattgctcacagaatgtcaacagtgagaaaggctgatgtaatttatgctataaatgaaggtcgtgtcgtggaaaaaggctctcacactgaactgatggatctcaaaggtttttattactcactagtaaaggttcagaaacttgatgaaaaggacaaagttgccacaataaatgttaataaagacgaattttttgatgaagacattgttgatgacaacaatttggaggcgtcagaaagtataaaaatgaagtataagaacttgaggctgaataagaaaaacttaaaaacgataatcgtttggttcctagccgctttgttcacagtcatcatgtcagcatttcttccagttttcttctatatctatacaatgttttttcagtcctacacatatatgaaagatgaactgagcaggatagccttgattaatgctggttatatctttggtttgggcaccattgcatttctctcagcagttttgtcgggtacaatgtcaactatggcaactcaactttggttgaaaaaactacaggtaaaagctttttataaaatagtttctatggacataagttggttcgacagaagtggatgctcgcctaacgaatgccttgaggtattgaccaatagccctccacttatcgaatcagttacaggagataaggcatctcaagttatcatcttcatgatttcattactattttccatcggctattcattcttcataagtacaagcataacattggcaaacctcccaacctccccattatcctttttgttattatcatcaactgcttcagaatgaagtccagagtcactgacactagatctgcctccattgcgaccaggtcaaccaaggttgcaatagaatatgatacttaactgtcaaaagcatgtcataaaccagtatcaggatatgctagcactttctaagagtgaagcttttgtaagcattatttggtatgctgttgtttatggtttgtcaaagagtctgatccgattggcaatgggaacaacatttattgtaggagctgatgacattgccttcggtaaccttcgaggaacatcacttattggaatcatctcagccttaagttttacatccatgctagccggacctgccttgattttaatgagccagtaccctaatgagccagtacccagcagcgaggcaagcattatctcgactccacagaattgccaataccaaaacatctgtcaacatgttatcagataaagggattattccagaaataatcggaaatatagtcttccggaaatatagtcttccatgatgtaatgttctcttatccaacaagggacaaagtgctagttctcaaaaagttgaatcttaagatcgaagcaggaaag

SEQ ID NO: 319 - DNA, 2212 bp, Nezara viridula
gtgaaagttaaatcactctctgtgaaccagcccggaggacgagaagtattcgcagccatgaaggataaattgggaatattagtattcatgtactacttgcaaatagaactgagtaaaccggtcacagctgctccgaaaggatactgcattgtccactacacggtccaagaaattgaagttgaaacctacatgtcttctgatttacgttggaaacaagtatatgaaagagggtattaccgttggaaacaggttcctgaatatgcaacaagatctcattatgtgccaaaatcagttacacgaacaagaacagaatgttgtgctgggtataaaaacactactgttcatgaaaacgttttcagttgtgaaccaatatgtgatcctccttgtatcgatgggcactgtacaatgcctggtaattgcacttgtttccaaggatttgagcaccaggatagtaataaatgcataccaagctgcaaaccaagctgcacaaatggcctttgcacttcgccaggtcattgtgaatgtatgcagggatatgactacgtcaatagttcttattgcgaacctcattgttctagtggctgcaaaaatggtgtttgtcacaaacctgaggattgcctgtgtaacacaggatataaaaagaattctagtaatcctattgaatgtgaaccgatttgtgacactgaatgcattaatgcaacatgtactgcttacaatgtatgtacttgtttgagtggctacggaaaacatcctgcacaagacaatgtttgtaagccaatttgtgaattggagtgcttgcatggtgactgtacagctccaaacacatgtacatgccatgacggatattctaagaacgattcatttagtaatatctgtgtgcctgattgcactaactgcctcaatggattctgcaatttaccaaacgtgtgtaactgccatcaaaactacacttacaatgaagatggtcgttgtgaaccaatctgcaataattgcagtaatggaacatgcatcgctccttatgattgtgaatgcaacaatggctaccaaccagacaatgatggaaaatgtattccatattgcgatagttgtgacaatggcgagtgcgtcgagcctaatgtttgcaattgtttcgagggttatcaaagctctacttggggttgttaccctttatgtcaatatggctgttttgcaggaacatgcgttgctcctaataactgctcatgtgaagggtatgacagagtagaagaaaatgtttgctttccattacagcagaatggaactaattcatctgaaaatattactcccgaaagatttgtgatagatatcatgaaaatatcaaacagcattgatatttataatctatctttatcaactatctatataaaaattaactgttcttatgcaacaacctacaactttagcagtaacagcgaaagtcatttttcaaattcaattgagtgttcaaatattaaaagtgctctgggtctctatgttctctgcatatggaatggctttagttcggatattcaaaatttttatacagattctttggattcctttatccatgagttgaatgaaacagaaacagagaaacattactcaaagttaggtatgacggttctgttttcaaggaatatgatgtctcaagatgagcactgttatttatgccctagtgagaaacatttgaggacaaagatgcctagcaacttcaatatttctttagtagcttgtgatttagaacaccttcaaaatgcagtaataagctataattggaaaggaatagaagtcatagggttggctatactgagtgcagtaatattgattagtttattgcttgtaatcgtttttagaaaatatctgagacgtgattactatggaaaagaagcaagacaaacagataaaatgacaccagcaatcaatcagaaaaaataaataagacgtgactcagcaaaacgaagaaacaaattagaaataaaaaaaaataaagaagatagaataagggacaatataaaagaagattgtagtaaatagatattcctgttcaaaaggtattgattaaataagctgtaaataaagctgtaatgagataattaacatagataatttattttacaatgtatatgttaattctactaagaaattattgagaaatttgtttgttggtttgtaaatattctgtgttttataatcatagttaagtaatagccattag

SEQ ID NO: 320 - DNA, 1877 bp, Nezara viridula
gttaaatcactctctgtgaaccagcccggaggacgagaagtatttgcagccatgaaggataaattgggaatattagtattcatgtactacttgcaaatagaactgagtaaaccggtcacagctgctccgaaaggatactgcattgtccactacactgaacaggtagaagttaaggaaagctacatgcatgaattcgtccgctcagaacttcaactatgtacccacggttttggttattacaattgctggagggatgtcaagaaacaagaacctcgaattaaaacagtgccaaaatcagttacacgaacaagaacagaatgttgtgctgggtataaaaacactactgttcatgaaaacgttttcagttgtgaaccaatatgtgatcctccttgtatcgatgggcactgtacaatgcctggtaattgcacttgtttccaaggatttgagcaccaggatagtaataaatgcataccaagctgcaaaccaagctgcacaaatggcctttgcacttcgccaggtcattgtgaatgtatgcagggatatgactacgtcaatagttcttattgcgaacctcattgttctagtggttgcaaaaatggtgtttgtcacaaacctgaggattgcctgtgtaacacaggatataaaaagaattctagtaatcctattgaatgtgaaccgatttgtgacactgaatgcattaatgcaacatgtactgcttacaatgtatgtacttgtttgagtggctacggaaaacatcctgcacaagacaatgtttgtaagccaatttgtgaattggagtgcttgcatggtgactgtacagctccaaacacatgtacatgccatgacggatattctaagaacgattcatttagtaatatctgtgtgcctgattgcactaactgcctcaatggattctgcaatttaccaaacgtgtgtaactgccatcaaaactacacttacaatgaagatggtcgttgtgaaccaatctgcaataattgcagtaatggaacatgcatcgctccttatgattgtgaatgcaacaatggctaccaaccagacaatgatggaaaatgtattccatattgcgatagttgtgacaatggcgagtgcgtcgagcctaatgtttgcaattgtttcaagggttataaaagctttggttggggttgttaccctctatgtcaatatggttgttttgcaggaatatgcattgctcctaataactgtgcatgtgaagggtttgacagagtcaaacagcattgatatttataatctatctttatcaactatctatataaaaattaactgttcttatgcaacaacctacaactttagcagtaacagcgaaagtcatttttcaaattcaattgagtgttcaaatattaaaagtgctctgggtctctatgttctctgcatatggaatggctttagttcggatattcaaaatttttatacagattctttggattcctttatccatgagttgaatgaaacagaaacagagaaacattactcaaagttaggtatgacggttctgttttcaaggaatatgatgtctcaagatgagcactgttatttatgccctagtgagaaacatttgaggacaaagatgcctggcaacttcaatatttctttagtagcttgtgatttagaacaccttcaaaatgcagtaataagttataattggaaaggaatagaagtcatagggttggctatattgagtgcattactattgattagtttattgcttgtaatcgtttttagaaaatatctgagacgtgattactatggtaactcatcaagtcaaacagatcaaattgcactttctttgaatcaggaagattgaataaggttttagatagttgaattttgtattaaat

SEQ ID NO: 321 - DNA, 1984 bp, Nezara viridula
aatcactctctgtgaaccagcccggaggacgagaagtattcgcagccatgaaggataaattgggaatattagtattcatgtactacttgcaaatagaactgagtaaaccggtcacagctgctccgaaaggatactgcattgtccactacacggtccaagaaattgaagttgaaacctacatgtcttctgatttacgttggaaacaagtatatgaaagagggtattaccgttggaaacaggttcctgaatatgcaacaagatctcattatgtgccaaaatcagttacacgaacaagaacagaatgttgtgctgggtataaaaacactactgttcatgaaaacgttttcagttgtgaaccaatatgtgatcctccttgtatcgatgggcactgtacaatgcctggtaattgcacttgtttccaaggatttgagcaccaggatagtaataaatgcataccaagctgcaaaccaagctgcacaaatggcctttgcacttcgccaggtcattgtgaatgtatgcagggatatgactacgtcaatagttcttattgcgaacctcattgttctagtggctgcaaaaatggtgtttgtcacaaacctgaggattgcctgtgtaacacaggatataaaaagaattctagtaatccttttgaatgtgaaccgagttgtgacactgcatgcattaatgcaacatgcactgcttacaatgaatgtacttgtttgagaggccacagaaaacattttgtgacactgaatgcattaatgcaacatgtactgcttacaatgtatgtacttgtttgagtggctacggaaaacatcctgcacaagacaatgtttgtaagccaatttgtgaattggagtgcttgcatggtgactgtacagctccaaacacatgtacatgccatgacggatattctaagaacgattcatttagtaatatctgtgtgcctgattgcactaactgcctcaatggattctgcaatttaccaaacgtgtgtaactgccatcaaaactacacttacaatgaagatggtcgttgtgaaccaatctgcaataattgcagtaatggaacatgcatcgctccttatgattgtgaatgcaacaatggctaccaaccagacaatgatggaaaatgtattccatattgcgatagttgtgacaatggcgagtgcgtcgagcctaatgtttgcaattgtttcaagggtaataaaagctttggttcgggttgttaccctctatgtcaatatggttgttttgcaggaatatgcattgctcctaataactgtgcatgtgaagggtttgacaggagggttatcaaagctctacttggggttgttaccctttatgtcaatatggctgttttgcaggaacatgcgttgctcctaataactgctcatgtgaagggtatggcagagtagaagaaaatgtttgctttccattacagcagaatggaactaattcatctgaaaatattactcccgaaagatttgtgatagatatcatgaaaatatcaaacagcattgatatttataatctatctttatcaactatctatataaaaattaactgttcttatgcaacaacctacaactttagcagtaacagcgaaagtcatttttcaaattcaattgagtgttcaaatattaaaagtgctctgggtctctatgttctctgcatatggaatggctttagttcggatattcaaaatttttatacagattctttggattcctttatccatgagttgaatgaaacagaaacagagaaacattactcaaagttaggtatgacggttctgttttcaaggaatatgatgtctcaagatgagcactgttatttatgccctagtgagaaacatttgaggacaaagatgcctagcaacttcaatatttctttagtagcttgtgatttagaacaccttcaaaatgcagtaataagctataattggaaaggaatagaagtcatagggttggctatactgagtg

SEQ ID NO: 322 - DNA, 1167 bp, Nezara viridula
gccaccaagaatatcaatctctatgaagtgaaggcgtatgtacgcaaagcccagaacgtcgccatgaaccttactgaggtcgaagccaaagttagagaagctacaaacaatgaaccttggggagcaccaacatcactcatggctcaaatcgcttcaggcacttataatcatcgtgatagggaagaagtggtaggctttgtgtttcgtcgtttcaccgaaaagggtgcgaacgaatggcgtcaaatatataaactgttacaacttttggaatacttgattaaaaatggcagcgagagggtcgtggacgatgttcgatcgaacattctgttattacaaatgcttaaactgttccattatatcgactcgaagggcagagatcagggcataaacgttcggaaccgcaccaagattttgattaacttgattggcgacgatgcgttgctccgcagcgagcggaaaaaatcacgcgctaatgcggccaagtttggcgctgtgctgctgtcgctgtatggacgtccagagcacatttctgcggctactcggtttgatgacgaagatttgctgagcagggtttatggcgatggcggcgtgtatggtgcaaggtacgatgatcctggcctggagtattcggcaagccaactttcaaagaaggaagagtatgacgagaatgcactgctgtcctcacgtaccgcatcagccactactcggacgcaaaaagttaatgccgtacccgaaccagacttgttgggcgattttttcactgctgatcaaacgaaaccaaaggcctcgcaagatgacgatgaagacgatgattttgatgattttcaagccgccccgtcccagcctgataagcccatggcgaatttggcgaatttgtaccagccacatctgacacaaccgcaagcgtcacagctgacatatcagacgcagtcgcaataccagagtcaacagaatccaatccatcagctggtaaacatggccaaaccccacgaagatgccttttcatctcttttttctagtgcaaaaacaggatctggtgcgaacgcatctcggcaatcgagtatgaccgcaagcagtaagccagtatatcctacatctcgtgtccaaactctgagtcaaccaacgaatgctccacccacagccgagttggacctcttgagcctctag

SEQ ID NO: 323 - DNA, 5691 bp, Nezara viridula
tatttaaattttaaataaataaagaattactatctgtatcgttaagtaattatttaacattctgtttataactacgtaaagtcggtttgtataaatttacgtaacagtaacataattaaactatgttttcaacataaattgtacttgatataaaaacaaagaaaaaaataaaagaaagatattcgagatcctaaaatgtaattattacacaaatcatcgataaatatacaaaaaaataacatctgttttacctaaaaaaaataataataaatttcattgaaaccgcatttaaattttttattaattaataacctttaacgaatggtctgggacatatgaaggggagtaagcatcaactcaaatgctgcatctttcaaattagcaccacggagattagcttcttgcaagtcgcttccagacagatcacaattctgcaaatcagcaccggccaggacggcagctcggagatcacagtttttaagatttgcattctttagcgtggcgaccctaaggtttactccagccatattacttccttctaaattagcaccttttaagttcactccttccatattagcccttgtccctgcaggatcttcaaaattacaggctcgcaagttagcactttccaaattggcacataacattttaacaccaagaagttgtgctccttctagaactgcatgagataaatcagctctctctaaacaacaccagcttaaattagctccattcatacgacatccatgaagacaagcgtacttgaaattaatatttctaagatcaagccttgataagtctgatccagccaaattgactccttgaaatctaagttctgaattaaagggtgtcattattaacgcattaataacatcccttctagaaaggggtaagttatccctggcttgctgagaaccagctataaggttttccagttgtgggatgacactctcaacaccgaaaaatcgagcttcctccaaaattccttcgagattaacattggaatcaaatataagctgtccattcctcagatagtttaaaattggttcaaaatatgacggacttctgtctatcaaatatgctccttggctatcaacattgctcggagtcataagatagccattgtccccttcagcaaacattctcgcaagcatactgttaggttctttcgtaacaagagtgctcctagaagtggtaaagtatttaccaccgacatttaaagtaacccaatgcgaattcttgatttttcctttaatcgattctgtttgagctatagcattaccttctccagctgctggaccaagaggaataaatccttcaccagcagatacataaaggatatcatcatccctaattaattttatgtcatcgatttctccacctttagctgtgaaaattctcttagctgctatattaaatttattaccagcagcattaagcaattcctccaaggaatgagtaattagcaacactttaccatcgacttcagacccatttctaaacacaatcactcttttcatagtgactttttaacagtgaacagatactgaataggcttctttcaaattggatatctcagctgtatttctgtttactagttcatcccttctaatcaatgggcgtttcacaatgatatttagaaggcgctaatattgactgatactcatgtacatttagaaaagaatttttcaaaaaggttacataataatattattttccctttttaaaataaatctcgacaattctaataattgtttgaaaattaaatattttttaaactgaaaactaatttcttcttgaaaagctgttttatcctttgaatgaaaatatggaggttgcaaaagttctgttggttgattacgtcactcaagagtctcatgatggtttcgtgtcagctgtctggagtaataagtctgtgataaaccattccattcccttaaaactctatatctaagattataacgtgaatattaatgaaaggatcgtgacataaacgaaatcaccaaaatgtggagaatgcgagaacttgctgacaaagtgaccaatgttgtcatgaactatacagaagttgaggcaaaagtgcgggaagcaactaatgatgatgcctggggtcccacaggacctctcatgcaagaagttgctcaggctacatttacgtttgagcattttcctgaggttatgacaatgttgtggaaaaggatgctgcaagacaataaaaaaaattggagaaggacttataagagtcttctcctgttgaattatcttgtgcggaacggttctgaaagagtagtgacatcatctcgagaacatatatatgacttaagaggtttagaaaattatgtttatgttgatgaaatggggaaagatcaaggaataaatattaggcataaagtaaaagaattgatagattttatacaagatgatgataaactcagagaagaaaggaaaaaggccaaaaaaaataaagataaatatgttggtctttcgagtgatgctatggggcttagaggaattggtgaacggtgggaagggagtagtggtggcaagtggactaaagaagaatatgactggagtgattctgccggaaggagagatgattatgatcctagcggagacgaaggtgataactcagagggagaaacaccagctccgaggagtccagcccgggtatacagggatactgaaaactctattcagaaagattcaccaattaaaaagcagttgagtcctgcacggagaatagacctaggcgctgctgccacctatggaaagactactccttctaatactggaattacggaaagtgagccagctaatgttccatcacttatcggtgatgtagcagatgatctgtttgaccctagaaagggcgtggatcctccacctacctcaaacgttacagaatttggagacttcacaaatgcctttcctcctcccgtcagttcaaacaccagcggagctgatgtaaaggacgattttgctgatttttcttccgcctttactgctccctcaagcttgcctcttcagacacattcacttcctccgatccagccaccgcttcctaatggaaattcaacagttaccaagtctcagtctaatactgaacttttgatgggattgagcggttttagcagtcctgtccattctcaaccacaatctttgaatttgacccaaactcctcagtctccatccatcaatcctctggattcacctatgtcagggggttatgtctccctttcagctgttaccggttggaagaaactagaggatgcagaggattggctactcaagttcattgctcttcttcctgggcctcttgttgagcagcggataatttcctacaatcaagaaaatgtgttagactccgtctactatgcaagagtattggaaggtgttttaagtttgcctggcgattcggaaatattaaatggactgtttgttgttgaaggtggaagttatgggatgtttttagaatctctgacgatcttgtcgaatagcttgaaacaagaagctgcgcctagttcaagactcaataggacgttacgtctcctcaaaaatttaatcacaagtgaggccatggtctcggcaactgttgatgtatgcttattcgttacaaggaaatcttccgctgaatgtgctatagcgatggccagatgggaagaagcggtacagttggccgtttctcttcccgtaaagatagcgaataagctcgaaggtcatgcgactgatatatttctgccaacaaatttttcaaaatatgtttttgtaaacttggccaaggttattggtattatttataacataaaaagaaatttgagcattactgtcaataataaacctgtctccttgttatttagcaaaattgttggcaatttttattctgaagattcagcaaaacttttttttcaaataatgtcttcttggtgtaatgaaagacagacgtttaaatttttaatatcagatattttatcaaaattagatcaaaaatgtgttgaaagaacagcttctctgattcttcaaagtaacaatttaatggtttccgatttattagggaattgtatcttacagccgtcatggaaatatgttttatgccgaaagatcccttttctcattttccattcttgtgataatattatcattaacctcgtgagatatttaggtaatttagatgacaagtcatttttaagtaaaactttaaccgatttattaagaatatggtctgacaaaagttctctaaaacatactccttatgaacagcacttgtacataactaagataatattgttgtctctccgaaatttaactgaccatattcaagaacatactgaactcaaatctacacttaaaatacacattttgcatggagttcctgttcatttagagtctacggctgaaaatatacgtgtaatgggaatggtttgtggtgaaactttcatgtctttaactgaaaaagataccaataacaaattaaaatttgattatagtgagataaagtcaagcagtatcgaactggctaacgagctccaaaaaattgcaaaatataattttgaaaatgagagctatatttgtgatgaatcaggtgatgatttactagagaaaatcttacattcgcttcctgaaatgcgtaaagaagaaacttccaaatctttaaaaaatcaacccatttctgtgataccaaaaattgtagcaggcactgaagcattagatttagatagtgatgatgaatttgaaccctatgatgtgtctaatgatgtcaaaagcagtgtcttaaaacgtcctaaatacttacgagacctcttagaaaacttgaatagtgaaaacgattatgagctttgggaagaaagtgtgaaagcatcagaagaattagttttgaaacaattgccctctgatgatgtttcattagccattgctttacttaatgtttttctgaccctaagtaacagatttaatttacaagacttcgaatcttacaagttcaatacttgtcttgctatagttaaaaccaaaccggtagaaactgctgaatacttgggatttgaattcaatactactggaaagtattcattatctactaggcatttgatgttggatattttagctggagcatctcagcaattatcgaaacccttaaaagaagaaaaaaaaagtgttgttatacttaataagattttaggtcaggttaaaagaatcggcactaaacctcggttgaaagtcggaagcgcaaataaattcatgtgtgtcggttcattcatttttcctttaatcagaggaaaattcttcaagggaaatgacgaatctccaatattacttgctgccgcgttgcgtaccattgctgtcataactctattctctcaaaatctcggacaactgactgttaaaatctgtaaagaggtcctggaacttgcttggttcatgagatatcatagtgatctatccgtgaggggtggggctatggactgtgtcgggagtgccttattggccgcatctgattgcttagaccagctgtcggacgagctcttggaagccgaagggtggttgatagatttggttcaatctgagcaggatcctgctcttaaagtttttgcaacaaatgttattcttcttattgaacaaagtcaaatcttacaaaagagggttttgttttaatattgcaatgtgattgtatctaaaaaaaaaattgaaataatgttg

SEQ ID NO: 324 - DNA, 4842 bp, Nezara viridula
attaggtttatttatgtcattaatggtataaatttgttttgtgttaaatgcttttacatggctagaaacagtgttttatagatttctgagtgaaattaaatttaaatgtgttaaattatgatgaacacttctgatagttcctgaaacttgtttactctttggatagtgtggtggttatctagtgttcttttcttatggttttgattttgtaaattttaattagtgacttgcttttgtatgatgtaggagacaataacgaagtaaagtgttaatgtaaagcaattatttattgtgtgccattgactggctcatcatttatttatcaacttcagatgcggcggcgtgaagacatgcaggtgaatgtggcagggctccgacgtaacataaaaaatctagctcataattactctgacgctcagataaaagtacgagaagcaacgagcaatgatccatggggtcctagtagtacgctgatgtctgaaattgccgaccttacttacaatgtagtcgcattcacagaaataatgcaaatgatatggaaacgcttaaacgatcatggtagaaattggagacacgtttataaagctctattacttttagagtatcttattaaaactggttccgaaaaggttggtcagcagtgtaaagaaaatatctttgctatccaaactcttagggatttccagtattcggatgagggtaaagatcaaggacataatgtacgagaaaaagcgaaacagctggtgtcacttttaaaagatgaagaaaggttgcgcaacgagcgtgcacgagcgcttaaagctaaagaacggtttgctcagacagcctcgggatttggcagtgacacgaccttggatggtgcatcaccttcgagtcctacgtttcaaacgagatcagcttggagctccagtgatgtcgaaactcctagtaaagtagatataatgtgtgccaggccgacaacagccggtgaagaagaactccaattgcaattagctcttgcgatgtcgagagaagaggcagaacaagaagaacaaaaaagaagaagtgacgatgtccgtctccagttagccatttctcagagtcagaatgaattcaagcagcaccagcaagaaccaggccataaagacccaggcggcagccacatgctagatcttctggacgtaaacctcggacccatcgacagtgggcctatccctaccacgtccgcccctgttccacttcaggacccgtggggaatgcctatccctccatcccgacctcagactctggatctcagattgaataattggaattcggttgatccctggagtgtttcgtcttcgacagcaactaatccttccgttgctgatccttggtcacccgcccccgctgcttctgcgcctcctaagccaatgatagaagacctgttgggtttaaacttatacagcacaaatattttttcgaatcacataacgaatacagacgaggctgcctccgttgacccgtggaaagcagtgaaaccccaaaacgacccgtggtcgcctgcaacagaacccagtcctgcattgtcgtcaccattaaatgacctcgacgagtttgatattataactaatagaaataacatcaacaataataataaaacttgcattagccctaatccttttgacatgagaggccttggagaaagcttgaacgataggaatgggttaggatctgctaaaagaaaaagtcctcatgcgttcttaggtgagaattctggattagtaaatctcgacaatcttgttactaaaccgacccagtctcaacaaagtcaacagcaaccattacgaccagttgctgctaaccccttctcaccggtgggtgctccgttgcagccagtccggaacactcctgctttcgcacctcaggcaatatctcaacctcttgtacctcaacctaatcctttcttgtcataggggtgtttctgattgcgtcgaacccaaaaattgtcaactgtctaaaattctttacaatcagcaaactgtcctcttttttcaacttaatactataggctattttccacatgagtgaaagcaataaaaaaaagctaaaaaaaaaaaagcaaagtctggaaaacgaactgttttctttgattactcgcaacacgtattatcaatctctgtgcctcgtaatttaaatgtttaaatgttaaatacctaatgtttgtggcccgtttataatttgagttgtattaattagctcttttaggatggtgcagtattatttttacaaatttttatttattcatggtttacatgttaggtttattgttattgttttgttttttttttaaattaaaccaaaggtcgagagctacggtttatgttacgactaatttatctttcccaatggaatatatgctcacgaattctgaatttcttacggttttttttaagagtattttattttgaattatacgtggataacatattcaaaacaccaaattatatatacatatacatatatatttatatttatcttacgagtatatggttaatgacattgcactttccttgtatataaactgacaatctcacattcttttttttttacataaaaataatacacttagaaaaaaattaaagaaggtaatatcttttcaaaatatctcttacgaataacttggcacatcaataaaaaactaaaaaagttcatttgtaacataaatattttcaactgtgcgctgctcgaatattttcaactttgtcgacatggaaacacagatatgccatgaaacatgaccagtaaacaaatgtgtaaaacgaaacactggtataaaagtgaacatttaaaatcaaaaaaagattctaacaaaattttataactcaaacataaaaatataataccaaacattatattaacagccaacaaaatttcaatcaacacatttaaaattatgaaaaattaaaaaaaaaattatatatcagtaaaatattactctctaacataacatagcttaaagaaaaacaaaaaaagaaaaacagacatccatatcaaaaaaattatatgaagaaggtaatacctatattatttatatataaatcataaaaacttcatgacgtaattaaagcttaaaagaagataaattacaaatgtaaaactatgaacgattctacatacgaatgcatctatagcacaatatattaataattattttacgtattttagtttcgtggtaccacgaatgggtcctcttgaggaatacaatccacaatttgtacgccgaaatacttgtaacacaccatctaccaacacaattcttcctaagtactcaagggtataattattcttgtacacacaatggtacttattgcctcgtatacgtatctgagttaccatgagaaacgtttaaaacgttcatgcaaacaaaagaaagtcctgataacaaacaaattcgtcggagagctgagcaccaacacaacataaacaaacagttggataacttcggatacgggtgttacaaacaatgcaaaaggacaaacgaaaaataaaaaaaaccgtacaaacaaagtcttgttgatcaaccgtcgatgtagcggtgacactatcacagatcctagggacgacctatcggggcagcctatgtctgcaccttggtcaccaccgccttgagcaggtccgagcccttgtccagcgagcccatcatcttgtgcgggtcgtggatctggtggtgttgttgttgttgggctggtggttgttggctgctgttgtgctccatcttggcctgcttctctttgttcatcctgtcttgttcttccctttcccgtctcgcctgctcgttgatctccttcaccgctcggagttccttcttcagcttcatcctccggttctggaaccagatcttgatctgcctctccgtcaggcagagcgcgtgggcgatctctatcctccgccgcctcgtcaggtacctgttgaagtggaactccttctccagctccagcgtctggtaccgcgtgtaggtctggcggcccctcttcctttcgaactgactcctcatccaggggtagagggggctgggcaggttggcgttgttgttgttgttgttgggttgaggtggttgggcgggtggcggttgttgcaccacttgctgtgcctgatggtgcggaggttgcggagccccgttgttgtacatcattgtatgttgttggggctgagcctgcgcaggatggccgtgcatgtggtggctctggtggtggtgatggttgatgtccatctccggcggactctcaggtccaccgatcccgttgccgacggccgcctgcagcttgcaagaggtgtacaccaccggcgtctggtggccgttctggggcatgtgccccatcgcccccgggctgtccgccctgtagtccatgccctggtagtagcccgcgttccggatgtccatcctatcgtagggcgggaagcgcgggtagggcacgccctggggcggctgccctgcgaccgggggcccgccgtagtggtgaggggggatgccttgccgggggtcgcagctggggtcctcgccccccacggcgccgtagtggtgttgctggtgcgggtgctccgccggcaccactcctccgttcctcaagtcaggcatgtaagaattggcgaagtacgagctcatgacggtgctgcctcgctgtgctcagttctgcatgtcacctccgcgcctcctctcagctcaactctgcccctgttcacttccagtccacagggtgatacgaaactaccagtgtccaaagtatactaagaatctaaaattgaagttaaaaaaaaatatcacaaagttattgcagccctgaggcctctcactacagactatcttattacactctttgaaat

SEQ ID NO: 325 - DNA, 4541 bp, Nezara viridula
ccatcttcacttcgaggtgttaagatctcttcaaaatcagatagggtttagtgtcctggcttttcaataaattcaaaagtttgtgaaattgtgttgggtggtgcaccaccccgattatagtagttactctagattaagttatgagtgtaaaaatggctgggcaaaccatgacagaccgcttacttgccgctcggcacagtatagccgggcaaggtttggcgaaatctgtctgcaaggcgacaacggaagaactgattggacctaagaagaaacatcttgactacctcattcactgcacaaatgagcccaatgtgtcaataccgcagttggccaacctccttatcgaaaggacacaaaacaccaactgggttgtcgtatttaaagcacttattacagtacatcacctcatgtgctatggaaacgagaggtttacacaatacctcgcttcgagtaacagcacatttcaacttagtaatttcttggacaagagcggagttcaaggagctagagttggatatgatatgtctccctttattaggaggtatgccaaatacctgaatgagaaagccatgtcctacaggactgttgcgtttgacttctgcaaagtcaagcgtggtaaggaggatggtgtcttaaggacaatgaatgcagaaaaattattgaagacactgccagttcttcaatcccaactagatgaattgttggaatttgattgctctgctgcagacctgagcaatggagttattaacatggcttttatgctcttattcagggatcttattaggctatttgctggctacaatgatagtattataaatcttctagaaaagtttttcgaaatgaataagaagcagtgtcgacaagcattagacttgtataagaaatttctcattaggatggacagggttggtgaattcttaaaagttgcagagaatgtcggcattgacaaaggagagattccagatttaactaaggctccaagcagccttcttgatgctcttgaacaacatcttgctgccttagaggggaagaaaggctctgctgcaaatactccgactcaatcagctagcccagagccagatcagcctcccgctaatcctttcctcccctcaagttcttttccttttaacaatattctcacagaaagccagaggacagatgtgaagagcggtgtatcagcgttatgttctactagcagtgcgtttggcacagccgcggcagcgcatggggtggaagggggagatgatgctctcaggcagcaagctctagctgaggaagaagctgctattaaccactacaaatctaaggtgcaatccccaacaaactccggagctgcaactgctactaatccgttcctggttggatctcctacacagccaattgttgatctctttggggctcctgttcctgctgctgagccacaggttcagcaaacaggtaaagcctccgatgacttattgcaacttggcaacccctttgctgacatattcggcgcgccagcacagcaagtacctcttggatctgcaccgccaccagttcaaccggctgttcaaaacaatatgtggatgtccaatggttttggggcaatgaataacataaataactccgcagctccaccatctagtgcttttgtaagtgacaacgcttttaactctgtttttggttctgccgaccaaccagctgcaacagcaccagctgctgctggcgaagtgaacccctttgctggggagggtaaggcccctcctcgccccccgcccccacgccctgcctcccctcccaagtctgcccttgatgatctaagtaatggaatccgtgctgcaatgggccaatcccagtcggcccctcagcaaccccctccacaacagcaaccattccaacaacagcctccttcacaacagtctttccaacaaccgactcaatttcagcaacctccacctgccccgcaggcatttcctcaaccaaattatcctcaaccaggtcctggtcaagtattccaacagcccaccatcccaggccaaacttaccaaccacctgttgttgggggtcaagcatttcagcagcctgtagtccctgggcagactttccaacaaacccaaccagttatgtttgcatcttcctcttccccagcaaaggttccgatggctgccatgcaagcaggtaacgaacctcagtctggtaaagtgttgactggcgatttggacacaagcctagcactcttagccgaaaatctcactataaacaaaggaactcagcagaccgcaaaaggaatgcagtggaactctcctaagaatgccgcaaagcctggaactggatggacaccacagccgatggctgctacaacaggtgctaactacaggccaatgggaccaggcatgatgagcacgccaacgtttgccagcatgcaccacatgggcatgatgggatctccgcggcaggtacccccgcaggcacagcaacctcaggagctggacccctttggggcactttgaacaggatttcaagtggacttaaatcattttgtaaatataacagtgagctgctcaacttacgacagctatattgcctgttaccaacaaaaggttaatcattaaatgtaaaaatcatagaatctagcctaccatttgttgataaaatccctctaaaaaaacaaaacaaaaatgacccagagttatgcggcgttgttacttcagtaaagcttcaaacttatcgttttgtttgattaatagcgcctgttttaaataatgtcttctttgttgacttctatttctatatttcatttaatttttttttttttttgtgtaagaagacaaatattttagtcaagattaagtggaagatataattgttaaaataaagtgggtaataaaaaaaaaaaagagatctagtgggaaattatttaataagtaaagttatacattttctattagagaaagttacaagtgtattagttaactaaatgcgggagacaattggtttaatattcattgccaacgaaaatacagaaaaaaagatttaaatatatatatacatatatatatcgcattagtttggtacctaattagaaaatgtatgttatctccttgtatatctttaaattgtaattttagttgtgtctttttatataatttgtgtcatttgtaaatattcgattgtttggattttaatttaatccatttattataaatatatataaatatgtgtgtgcgtgaaatctcgaaaaattattttgaaagaggacatattgaaagctattaaatgtatttatttaaaaaaaaaaaactgttacgttactgattgttactacgagattgtactatataattatgaaacttagtcattaagtattatttaattgatataggttcttataagaacataacctatatgtatagcatatatatacaaaacatattggtatataagtatgtttaagaacatggtttgattatggaaaatctcttatcacgagagcaagacaatattatttttaagtcttctaagaatttcatctcatcaatatcattattgaaatttcgaatcttttaatcaacattttaataaaattcaatgtttattaagatattattttatgaatatagaatatattagagaaaaaatgtataagtattactaaaaatgtaaacatactattttggaggggagactttttaaatgttcacctattgctgtttgtcaaattctacaatgctattttatatattttattgcaaaaattatttttgatttgtgcacacgtatacttccaagaaatatatcaaaagctccttaatatataaaatacttattgaccaatagataggaaggatgagtgcgtgatagtataagctactttatatcccctgttgcccccagatattatctaaggcatgtgatataattacacaggtatttatttcaggcagatctgtagtgcgtttcctgcacctgtgtacagggtgtgtatgttctggtagggaaggaaagagattgattagcgtacatgttaacattttcagttcatcacaaatcttgtttacttagagtagtcttggagcaaaaaatactcacaattaaacaaaaaaaacaaactagtttttagttagaactttaggagactgatgaaggagactgcccaatagaaactatttctgttcctaagatccgtcggcttgtgcatctttctctttggccttcccacctgctgtcttattaggttatagatccagtctgtggttacgtatatatatatattgtgtatgtagaacgctttcaattcatttttttttttattttaaattttgtattaaagcacatgtcgttattttggagagcgttttatgttttttaaagttaatctgttttatttattacaaattgttaatattattaatatcacattccactaattgtttcctttaaagatttaatgtgtttagaaaattatttctttgaaatatgaattttaaaaattgtttatcaccaatagcattgtgaatgtatgcttactgttcagttatattgtttaacagttatgtttggac

SEQ ID NO: 326 - DNA, 765 bp, Nezara viridula
ccaagcaataacattcaaactatcttcctagggtccccctctggcgagaataatggatgcagctgaaccaacattaatttgcccttacaacaagtcgcattctatcatctcaagtcgtatgcaatttcacctgactaaatgcagggcacaacatcctgcaagcgagaaggctgtatgtccattcaactcgacgcatattgtccccaaggtggagttagattatcacaaaaccactgacaggatcgtcttggattcattcacatgtaaggtcggatcttctaatgcccccaaactagaactaacaaaagctaaaccccttttaataaaaagtgacgaaaattgggaagtcagtgatgagcctccagtctcagtcttagaacaagttcacgaaacgtctaggcagaaaccaacattgcatgcacttatcggggctcccaaaagtgagagaaaggcgtttcgtaaccaggaaagactgagaatccaaagggttcttgatcagcagggggaacaaagggggggggcctctaagaaggtagaatcacaaagaagaatggaaagcgaaacaactgccaatgaagtaacaccacccagtcacaaccgcaatagaacagtaaataccagccaggtcatgttgaacaaatggaagatattggtgtcattcattgtcgaatgaatgttatctgcgagcgtcttttcttctaccagaaagtctcaggaaactctcgttaaaattatcaatacatctataaaataaaataatcaacc

SEQ ID NO: 327 - DNA, 3177 bp, Nezara viridula
ttcagaatgaaattatatcatttgaacctattatttgttgtgctaactaatggattattatcagtcagtggagcacgtttgaagtgcccgtctgtttctattgcaaatggaagttttaaaatccgttcgaaaggacgaattattgtctacaagtgctccagaggattttatttactcggtgaagcttatgcggcttgtattaagggaaaatgggattctaatccacctgtttgcatgaaacctggttgccctcgcccaactaatttattaaatggaaaagtgcaagatagttggagatcatcgttattgaagttcacatgtaatcctggtttcaaacttattgggccaccttatatttattgcaacggaagacaatggaatgctcctcaacctatctgtcaagctgttgatatcaagtgcgactttgagaaaaaaaatacatgtaattggattatagatgattatgatgatgacgattttaattggcgtttgcagcaacatgaaactccttctcgagttcttaaaacaggacctttacatgaccacactctgtctcctaatacgacaggtcaataccttgtgctggatactagtgaatacatgccatcgtcaaaaccagctagaattcattcgccagtcttcccacaacctcctgataacagttcttgttttatattttggtatcacatgtatggaaatactattggcacactgaatgtgtttcttaacaatgttttgtcttttcaaagacagggtaaccatggcgatcgttggataaaaggaattatttctcttagtgaaaatgttaccaggagtgatttacaggttataattgaaggcacgtatggtgggggatatacaggtgacatcggtttagacgacttctctataggcaatgggactgattgcttaggttctgcagttaaatcctgtgttggaagatgttatgaagataagaatgaggtatcttcatgtttatgcaatcccgaatgctcagttgatgcttcctgctgcgaagattttctggatgtctgtagtatagaatctacaacaccattttttgaggcaagtactggggtcgaagatagcacacaagtatattccgacacctctggaactacagactatgagactagttattctgaacctattagctcgactgaattaggattcactgccgcctcagaaaatagtactgacacaagcagttttacgtctttacaagatttagattcaatatattcaaaagcagatgttgaacaatttgaaaaaacagaatttttaaatagtagtggaaaaaatcatgatgttactggtactgaatttcattctctcagtacctcttcatatgcccaaaaagaacacggaacaaccaattctactaaagaaactattattgtaaatagatttgctttttcaacaggcataatggctcaaacaacagatagaactactgtttctactcctgaaaacaatattacagtcaagagtttttataataccacgactgaggcaacttcaaagcattatgattacttgtttaaattaaatagccttggaacaacttctactaaagctgatttaagtaaatttacaaagtttataactaattcaattaaaaccactattatacctcaggcaatatcgaccaaaacatttttctttaaagttccgactgacaaaactttcaatccaaacaatttaacggaaaatactacaaccttgatgcctttgaaaatcttaagaaccaaagaacctgatattaacaataaaactgacaataaaggtagtaccaccaatatgccgttgaaaattattacattaaaaatcaaagagcctaatataaacaatataactgaacgtaaaagtagtacaacctatctgcctttgaaaattaatttattaactaccaaagaacctaataaaaacaataaaactgaaaatagacgtagtacaacttatatgccttttaaaattaatttattaacaaccaaagaacctaatataaacaataaaactgaaaataaaagtagtacaacctttataactgtgaaaatgaatacattgaaaagcaaacagcctaatactaacaaaaattttactaccaacaaaacggtattcttaacatcaaaacatactcaatctactacgccattccattcaacgaaggtttaccaaaccactcccgtacagcctaatactaacaaaaattttactaccaacaaaacggtattcttaacatcaaaacatactcaatctactacgccattccattcaacgaaggtttaccaaaccactcccgttcctaacttgacctctagcaggacatctaaatctgttacgaaaagccttaacccattaggaaatggaaccactcttcattcgatggctccatccaataagattacaccagtccaatcttcaacaaatgctatacttaaaaatttaaaaagtataacaccttctttagagaagaataaattttatttcaacatcacatctaccattgtgccactgttccataacgttactgtaccgacaacatctgttcaaacgaaaatggctaccagtaaagttgatagtaaaaagatagttaatgattctcatactcatttacaaactacctcgcaatctcctcctcttttgaatactaccgaaggatcagtcccattcacttttattataacaaatacacagccaatcaaacttaatacagttaatagatctaaaaaatggaaatcaatatacaaaccgaaagatagatttatgttctctgcagttcggagtaataaagatagtgacaataagacttacataatattatcgacttgcgccgtagtaattggtattataagttctttgctggtagttctcttcatcagaagaaggagactaaggcttgtgaatgagttagaagaagcggacacagacatattataccattcctctcaggaaatgttggatctccatattgcgaggccgaaccattaaaacataatatgttctcatttttttttttttttttttcgatgaatgaaagatattgttaacagtattttatatgaaatgtcttgtgttgagcatgtacaatgttatgaacgattgtcgtagttccttagtttgttgtatagtaactgttattaataattttgttattagttttgaggactcttaatg

SEQ ID NO: 328 - DNA, 2413 bp, Nezara viridula
caaccggtgaggatatgaaaacatggtgtatcataagtctagcctatcttggtttagttgtaggcaaaccggctactgacgttggcttgccactgaaaacatctacaactaccaagacaaggaacaggagacaagacacttctgaggtatgtgacttcgggacggacacagacttgataatgtgcggttggacaaacaggaatggaagtgcgctgaggtgggaacttggtgctgggaccttgtccaattggctgggtggaccaaccaaagatgcaagtggtggagaagaggctgaaaagggtggttactttgaaacatcgctactcgccgcaccagttatgcgagtcgacgacatcaccatccgtgaagggcaaaatgcttacatggagagtccaatgcttagtagcacaggtccagaaggaaaatgcattggctttagcttctcactggatggcctcagtgcttcaggacttcgtgtcgtgctccagccggtgggaaaggatggcagacctgaatccttcttccgtgttctctggggctccaaggatccaacaaacaagatatgggtgtattccgaagttctctatacttacaacagaaaccaccagattgtatttgaaggaatagccaaagacttaccagaccgaaagtacagaggctatgttgcagtagataatattgtgattaaacctggttcagaatgtagggggcattgtacatttgaaggaggattttgtggctggataaatgaagaaaacgatgattttgattggtcattgggtaggggcagtagaaatccttcaacaggaccagcaactgacagatctagctttatgtatggtggaatggaaggaggttatgcattcattgattcttcatacccaagaagacctggtgatgtagctaagctttcaagtcaggagtttgaacctacagatacaccactttgtctcagattttggactcacatgtttggaaatggagttggaaccctcagtgttttattaagtgacacaagggaaagacaagatcaagaaatatggtcactcacaggtgaagctggcaatgcatggtatcaggcagaagtctctgtttcatcttctaacaattacaagatcgttttgatgggtaaagttggaaagaacaatcttggtgatattgcgatagatgatatttccttgactccaggaagttgtccaactgctccacaaatagctgctccaggatctggagattgtacttttgaagtagatgaatgtggttggagtaatgttgtttcaagagagagaatggatgatattgattgggaacgaacatcagggcaatctgtaagaactactgctagagaccatactctgggaacagaaaaaggatatctcatgactttggcaagaagtacagtacaacgaccaggaacaagagcatggtttacttctagagatctgaaaccatcaatttcaacaagatgtctttcattttggttcataatgaatgaacctttcatagataatgcaggtccaagtttaggagctttgactatttatactaaaagtggaatggagagtgatgctcccatgaaaccagtttggcgtttatataaccatcaaggaccagaatggcagtatgcacaagcgttgattcaggatcctaatgatatgataattattgaagggatttggggctcaagtatggatttattgcgtttgatgatattactttttttggtggatcttgttccaccatgccaagtggtgcaatggtgagaacaggtgaatgtagatttgagcgtgacatgtgtggatggaaaaatgctactgaaaaaagttcaccttcatggagaatggctactagtaccagaagaccagctaaccttgctgataaaacctttggaagtccagatggatacatttattatgacctgttcaatcaaatgcttggaagcaatatggtacgattagcttcaccattgattcaaggaagtgaagagcaacagatttgtctttcattctggtatgcagcgtttggtgctggagattctgctcttatgcaagttattagacaagataatagcagttccaacaatgaaatggaaaagatttggagtttggaagtgaaaaatgtggacacaacaagaccattgtggctcaagtcacagttgattctaatactgattttcatatcattttagaaggccaagcaacaaatggcggatttgctgttgatgatataacattcacaccaggttcctgtccaacaagacctgagaaagcagaaatcaaaagtcaggagctgcagtccacataatttcgaaataacgttttaagaaatctatggactacaatgcttcagttttaaggcaagaaaagaaagaagatattggaagatctattacttcgaaatagatgcacaaatg

SEQ ID NO: 329 - DNA, 3663 bp, Nezara viridula
cacgcccacttttgaaatcatatgatttttgtttccctcacgattactttctttataacatcattatgaaattttaactgaattgttatctggtgttgtaggttatctattctaatcttttttaagttattttacgggattttaattggtgtgaggggaaacagaatgagtgaatactggctaatatcagctcctggcgacaaaacatgccaacagacatgggaaaccatgaacaatcttaccagtaaacagcacaatttgtctgaaaatttcaaatttcatattcctgatttaaaggtgggaactttggatcagcttgttggactttctgatgatttaggaaagcttgacaattttgttgatcaggtcactcacaaagtagctcagtatctgggcgaagttttagaggatcagaaggataaattacaggaaaacctaatggctaataacactgatttatctacctatattacaaagttccagtgggatatggctaagtatcctattaagcaatctcttcgtaatattgctgatattataagcaaacaagtgaatcaaattgatgctgacctgaaaacaaaatctaccgcttacaataatctaaaaagcagccttcaaaatatggaaaagaagcagagtgcaagtttgttaacacggaacttagcagacttagttaaaaaagaacattttattttagactctgaatatctgacgacattattagttgttgttccaaaatcaaacttcaatgagtggaataccagctatgaaaaacttactaatatgatagttccccgttcaagtcaacttgtttatcaggattctgattttggtttgttcactgtctcattatttaagaaggttgtaaatgattttaaattaatggctagagaaaagaaatttgttgtacgtgattttatttataatgaagaggaactagctgctggaaaaaatgaaattacaaaattggtgactgacaagaagaagcaatttggacctctagttcgttggctgaaggtcaattttagcgaatgtttttgtgcttggatacatgtaaaagcattgagagtttttgttgaatctgttttgagatatggtttacctgttaacttccaggctatgttgatccatcctcacaaaaagtccgttaaacgtttgagagatttactgaatcaactatatgcaccattggacagtagtgctcaacagcaaggaaatcaaggtggtggtaatgatagtgtggacattcctggtttaggattcggccaatcagattattatccatatgtatattataaaataaatattgatatgttagacacaaaggcttaacagaagtactcatggattttggttttaatattcattgataatacaaatgcttagttagcaatagaaaatatacatttcaagggaaaaattaagctacatagttacttacatttttatcttatgtgtatgtacatatatatatatccataaatatgtattacacacatttataaaacttaatgtgttaacgtaaagtagttaggtgtatgttctaactataaacccacatgattaatgaaaacaagtaattcgctgacttattgtttaggaggttatatatatatatttttttttttttttaattgcattgggaaaattctcattaaaacattgtttataactagaagctggaatcttctttcatattttaattattttttgaaattattatttagaaacataattgttatgtatatatacatatatcatatttttggatatggttttattcattaaaggtttttcatataatttgaaaatagaacttgtagcattgagaggcttttcatttttaaatattagattttttttccgaagtatttatatctatttctttttaagcattaattttttctcatttcttacagtttacatcctactagtaaaaacagaattatttgtatactttttgcatcatccattacttatattacttgcaatagatacttagcatgaagtataattataattttgtttttatatcttctttttataaatgttgcaactaatttgttattaaatattgtataagtataattatattgtataagtataattataattttgtttttatatcttctttttataaatgttgcaactaaattcaagaatccagagggtgatcatcgagaaaattgattaatttatattttgattatctttatatctgttctattttaccaacagttcagatttgttcaaatagtttatgagaaataactttgttattaaatattgtataagtagtatttttgtgattttaaattaaattaaattgtaatcttatttaccagcacccattatatgatttgttattgctgttttaattagcaatagttttgattgatgtacatcacttatttcattgtcaaaacagaaaaacatctttttaatttttcacatttctgttcaaagtattctgcataagttttttcttactaataattattagtaatttgttatcctcttaacacttgttttagtttcattctacatttcatttagataattttatttattagtctagacattttatttgaaaaattattaatcagttttcaagtaaaattgttttattgcatatttattgttaagttttactagttactattttatttgaatatttattttaaagcagattatggaataatgcactgtaaatgtgtttatttcatttctagtatgagttaatgttaaactatattgaaattagtgttaaaactataataataggtgggaaaggaatcaatatcttaaaagaacaaaacatataatgtatataatttatcattgatgtatgtaacaatatatatttatataggtatagttttgtgtaaaaagtgagattatgtccatcattgctccttaacaaattatcctttttctctgaaaatcatatttacattcctgtttatagttttcaaaaataatctactggattcatacaaactgttatcaaaggtagttattagtattgcataggaaacagcgtttttaattgaatgtattttatttaaatttcaatgtttaatattcaaagtgtcatctgtgttttaagaattaagttggtttataggttaaaaaaataaaatctgtattaattataagcaattaaagtgcattccactagaaaaagaaatcagtctattttaaaaacataataagtattttattgttcagattttatattaatgttgtaagcagtgtgtaataaaattgtcataatttactgcttatgaattatattttgtaaattattgcagtatcatttatatttgaaaaaatatttgaattgtattacattgtgagtgtcagtggttgagaaacattttattgtaaacatttctgtatatgttaattgtaaataaaattcttatgaattccaatattctggagatatatgggtatgagtgcaggaaataatgttttaacatgttcctggttgacacaatattatcaagatgttattgctgtcaggttttaggtgtgttagttgatttaagattcattgagttcatttgtttaaaaaaaaatatatttgatctgtaaagtaaaatatgtataaattaattttcattcaaaaataaaactttgttgctgttttgaaaaaaa

SEQ ID NO: 330 - DNA, 1391 bp, Nezara viridula
tagtgacaattagcagatttgttgttaacagtacaaaatgttataataggcatgatgaatgttatttaaaattgtctttaaaatgtagatttatatttattcgaacccgagggatcatatggaaagcctaaagttgagagaacgtacgcacatgttcctggttaggttattttttgtaccgtttcagtttcgggctaaaagaggattatttcatgaaattgggcagttgagatgacacaaaacgattcccacagttttgagtattggttcattggcctcccagcatccaatgatccaaaagatgaaaaggcaaaagacacaaagatcaaagatcctctcggcaagaattgggaaaagattggaatcagtcattgaatctgtagcgtctaagataagtcaagcattagccgacgtaatggaattgaaaatggaccaaatggaagaattccttaacgtgaacggcgtttcacttccagaatatttgctcaagttcagatgggatctatccaaatattcgatgaggcagacgctgaaaggaatcgaagatcaaatagagaaacaaatggtgggattagaaatggaaactaaaacacttcattgcgaatacgtagcagcgagaacagaacttgcctcaatggagcggtatgagaaaggcccccttcatacgaggaacgtgtccgaattcgttaagatggaagacttcgtactcaactcggaacacctcattaccgtcctggtggtcgtatccaagaccagctaccatgattggtacagtagctacgagaagctagacaacgaagtggtccctcgatcgacgaaccttctttttgaagattgcgagtatggtctgttcaatgtcacactattcaagcgacacctagacaatttcagggagaaggcccacgaaatgaagttctacgtgaaggatttcatttttgacagagttaggatccaagacgagcgagatcgactgaccagccttcggcagaagaaggcgaccctcataggccctctcatccgagccctcagaatcaacttcagcgaaacctacatgtcctacctccacatcaagacgatgcgggtcttcgtcgagtgcgctctccgttacgggctaccggtcaacttcctcggtctcatcatggtcacgcctaagaagaatattaagaaacttcgcgatgtattgttcaaagaattcgcttacttggatggttcgctgcccaaggaggaagtcagagaagagaaaaaggtacaaccggatcaagctgcgccatctcccgactacttcccgtatgtatgtatcaaggtcaacgtggagcctcaagaattcaagtaaatacagttacaattttttgtccaagaatgaaaataaaatgagtaaataatacaatatt

SEQ ID NO: 331 - DNA, 2016 bp, Nezara viridula
ttcatcagtacttttgaagtagccattgtggcgtgccctgtgtagattttcacatttccaatagtcaaccgttgtaaagtgaagtattttgagtctgaaataatttttagaataaaatgtcgtactacaatcaaagaggaggaactagaatgaatcgaccttcttatggtggtggtagtggccatcatggaaactatcattcatctcaaaatcagtcttacacccaacctgcttacagcactccgagtagctatggatccaacaaatctgccagtgatccacgcatctatcaacaaaatcatcaatcatcgccgaagactccttcacaacaggcagttcagcagcagccttcatctcaacagccaccacagcagttaccaccgccctctcaacagcaatcagctcctcaacagtcttcaatgcccccagaacaacatacacctgttaagatggatgaagataagagcaatgaaacaacttcagatgcaaatgatgatggaatgggaagtggcactcctggatcaaggggtcctaagtttagaccctggaataagagaggagctgccaatgttaaaataaccagaaaaatgaggaaacgccgtcagaacgctcgtttaagaaatctccttgcacctaaaaatgccatgatggttttacatgaactgcacccagaattgaagatggttatttctgaacaagttaatgctgccaatcaaactgcatatacagtagaaattgaggttgagggtaaaatatacagaggacatggcatgtctaaaatgtctgctaaacaagctgcgagcgaaaatgctctgaaagccgtgcttctagaaaaattggaacagaacaatctaaaaatcaatcccgacaatacactgagtagtgacggaactcaagatagtagtggagatgtgacaatgaaagaagagtcagtggcaggggatgtaacaaacccagaagagcaggctgcaggcccaaaacctgtcccaggaagaaggctgattgaagatgacgttccgtggggctcacttgcatcatttgccctttttaaacttttttcagaatggcaatcccagggtttccaactcccaccttctggtttacctcctgtgtttcataaggccacaggagctaaaaaacttcctgatgatgccaacaaaaagcatcctgtgcagttattaaatcaaattcggcctggctctcaatattctgaatctcgtgaaggagctccacctaatcttacttttaaatttacagtttctgtggatggtcaaacatttatgggtgttggttcaaacaagaaagatgccaaaaaagaatgtgctaaacatgcattagaggctcttggtgtcaaatatgattaattgcttattattttcaaagaagtggggcataagaagtcatgtttgatatcaatatttttattagtttcattacatcaataaagatattttttttcctttttttttatgttttgtacataatgtaatactaatcttggttggtattatagatctttatttagaggatttgtctgtacagtcaatagtatataattttttttattaaccattataattgtcataaacgtgatttatatatatatttaaaattaatgtaaaattattactttagtcatattaatgtgtgggttatttttaaaaataacaatgatgaatttaacctgtgactatttgttataatctgtaactgtttataagagtatgttaagatgtagctgataaatgtctagatattcttattttaaatttgattgacgtcttagtaagaaatagatttgcattataatagtgattacgaaatactgaatatttatatatgtgtttatatatatgtcactgttttacttagtttactttatcttatgtttttatttaaacaccagtactgtttaaagtattttcaaatctaattttaacttatatggatattagaataatatatgttatttttatttatttgactgatacgccaacatcttgataaagttgaggc

SEQ ID NO: 332 - DNA, 2224 bp, Nezara viridula
caatatttaagtttaattatatgaattccttaactattttgggaaccatttatgaattagtacacggatttttcatcgattgaaaactggaagacgctttgctggtcttcatcagtacttttgaagtagccattgtggcgtgccctgtgtagattttcacatttccaatagtcaaccgttgtaaagtgaagtattttgagtctgaaataatttttagaataaaatgtcgtactacaatcaaagaggaggaactagaatgaatcgaccttcttatggtggtggtagtggccatcatggaaactatcattcatctcaaaatcagtcttacacccaacctgcttacagcactccgagtagctatggatccaacaaatctgccagtgatccacgcatctatcaacaaaatcatcaatcatcgccgaagactccttcacaacaggcagttcagcagcagccttcatctcaacagccaccacagcagttaccaccgccctctcaacagcaatcagctcctcaaggacagcagcagcagcagccgccgcaacagcttcctccgcctgtaccaccaaaaattgaaccacagtcttcaatgcccccagaacaacatacacctgttaagatggatgaagataagagcaatgaaacaacttcagatgcaaatgatgatggaatgggaagtggcactcctggatcaaggggtcctaagtttagaccctggaataagagaggagctgccaatgttaaaataaccagaaaaatgaggaaacgccgtcagaacgctcgtttaagaaatctccttgcacctaaaaatgccatgatggttttacatgaactgcacccagaattgaagatggttatttctgaacaagttaatgctgccaatcaaactgcatatacagtagaaattgaggttgagggtaaaatatacagaggacatggcatgtctaaaatgtctgctaaacaagctgcgagcgaaaatgctctgaaagccgtgcttctagaaaaattggaacagaacaatctaaaaatcaatcccgacaatacactgagtagtgatggaactcaagatagtagtggagatgtgacaatgaaagaagagtcagtggcaggggatgtaacaaacccagaagagcaggctgcaggcccaaaacctgtcccaggaagaaggctgattgaagatgacgttccgtggggctcacttgcatcattcgccctttttaaacttttttcagaatggcaatcccagggtttccaactcccaccttctggtttacctcctgtgtttcataaggccacaggagctaaaaaacttcctgatgatgccaacaaaaagcatcctgtgcagttattaaatcaaattcggcctggctctcaatattctgaatctcgtgaaggagctccacctaatcttacttttaaatttacagtttctgtggatggtcaaacatttatgggtgttggttcaaacaagaaagatgccaaaaaagaatgtgctaaacatgcattagaggctcttggtgtcaaatatgattaattgcttattattttcaaagaagtggggcataagaagtcatgtttgatatcaatatttttattagtttcattacatcaataaagatattttttttcctttttttttatgttttgtacataatgtaatactaatcttggttggtattatagatctttatttagaggatttgtctgtacagtcaatagtatataattttttttattaaccattataattgtcataaacgtgatttatatatatatttaaaattaatgtaaaattattactttagtcatattaatgtgtgggttatttttaaaaataacaatgatgaatttaacctgtgactatttgttataatctgtaactgtttataagagtatgttaagatgtagctgataaatgtctagatattcttattttaaatttgattgacgtcttagtaagaaatagatttgcattataatagtgattacgaaatactgaatatttatatatgtgtttatatatatgtcactgttttacttagtttactttatcttatgtttttatttaaacaccagtactgtttaaagtattttcaaatctaattttaacttatatggatattagaataatatatgttatttttatttatttgactgatacgccaacatcttgataaagttgaggcatatttgagtgaaataaaattttactgtgaagtaaaaa

SEQ ID NO: 333 - DNA, 2970 bp, Nezara viridula
tttcgggcctttgtttactagtggcaggtcaccgtccgacccggcagttctcttctcgccgaggatctctggtcgtctttctcgtcccattgtagagcgacccatcatcttaatggatgtttcacacatttagaggaatgttgtgatgatggcatcacccgccccttcagtagattctttggttgggattaattcaacaaaccctcatatagagcaagaatatacatcatcatatccaagtgattctcctgtcacagtttcaccaacaacatcagttaccagtagtagcagtattggaagtggtggtcaactgaatactcgttgtggattatgccacgaaacctttgttaatcctaaagttctgccttgtttgcacactttttgccaatattgtttagaaagaaatcaggaacatactgataaacttaattgtcctcgttgtcagcaagagtgttctctcacttccaaaggtgtttcagctcttttacccgattttgctgtcaaaagtgtcattgaagcactagaagatccaaaagttcattgtacaagctgtaagagcaaaacttcaaacgctgttgcacgctgctacgattgcaatcattacttgtgtcctaattgtgtgatggcacatcagtttatgcattgttttgaaggtcatagagtccttaccttatcatctgaaactgtaaaagaagattcaaagaacggtatggcttcacctactgaaaaagttgttccttgtcctcgtcataaaatggaagctcttaagtatttctgcagaacctgtaatgttcctgtttgcaaagaatgcacaatgattgatcatcctgcaagtcttcatgaatgtgaacacttaagtgaagtaggccctaagcaagttgaactattaaatcagacaatacaggaaagcaaatcaaaagcaactgatatcagaaatatgttaaagacattagaacattcttcagggcgattacaagtacagtatcataaagctcagaacgaaattaatgatacattccagttttacagatctatgttagaagaaagaaaacaagaactcctgaaagaactggagagtgttttttcagccaaacaaatgtcactcagtgtatttagccaaaaagctactgagactgtggataaaatatataatgcctgcgaattttatgaaagacttacaaagcatgcaagtattgttgaatgtttaatgtttaaaaaactaattgacaccaaactgcaaggtttgactacatttaatgttgatgcgaacatccaaactgtgtatgatctagaatttgtttcaaattaccaagcaattcaggttggcgtgaggaatacatttggctatgttagatcgagttctgatgtgaatttaggtccaagtaaacaaccgcctattgctagaccaatcaatggaattcatttgaatggtagttcaaatggagttagtacttcttctatacatattgtaaatgggaataccattaccaatggtttaaatggactttctgaaagaccttttgccaatggattgtcaaatccaggttctcaatttgaatcgaacattatttcaaaacgattcagtacagctaactcattaggcccattctcaacatcatctgttagtgacattaacatcaatagtgtgaactcatatgaaaaatggtcaaatggttcagatatgttcccaaatggaacttcagaacactattcattatcacttgctaaccatggggattctatgttagatataagttcaaagcttctttcaacatcaatttttcctccaaaatcacaaataaagcgccaaaagatgatttatcactgtaaatttggtgagtttggagttcttgaaggtcaatttactgaacctagtggagtagcagtaaatgcccaaaatgacataattgttgctgatacaaacaaccataggattcaaatatttgataaagaagggagatttaaattccagtttggtgagtgcggcaaaagagatggccaattactttatcctaatagagtggctgttgtaaagacttctggtgatattattgtaactgaacgatctcctacccatcaaattcaaatctataaccagtatggacaattcgttcgaaaatttggagcgaatattttacagcatcctagaggggtgactgttgacagtaaaggaagaattgttgtggttgaatgtaaagtaatgcgagtaataatttttgatcagaacgggagtgttcttcaaaaatttggatgttccaagcatttggaatttccaaatggtgtagttgtaaatgataagcaggaaatattcatcagtgataacagagctcattgtgtaaaagtcttcaattatgaaggggttttcttgagacaaattggaagtgagggagtcactaattacccgataggtgttggtattaattcatctggtgaaatattgattgctgacaatcacaataattttaatctaacaatatttactcaagatggccaacttgtatctgcactggaaagcaaagtaaagcatgctcaatgctttgatgttgcattaatggatgatggttctgttgtccttgccagtaaggattatcgtttatacatttatcgttatgttcaaatccctccaatagggctttaaatattttaaccagttgacacttttgtattgaccattccagacactttgttggtgggttgtttttttttttttttttggaatggaatttatctttttacctatctatttatgtggttttaacttatgcttattgttaaattgtgacagttttaatattataatatcaattttgagtagatttcgaaagatctagttttaagagttgttctctttatctttataagtatgtttgattgtagtattttgtatcattatacttgagagagtgttggaaatttgattgaatgtatttttttaaaactttgttttgacttaaaggcagcatagcaata

SEQ ID NO: 334 - DNA, 2066 bp, Nezara viridula
aaataatataaaaacatttcccaagtgaatgggctaaacaatatattactttctgaaacttttctcttcagtttggaattgacatgatcatatctacactttttaagttaaaaaagtattcatttatattttttaagaaaatgacagaaattaatgtcataagaatgagaaaatgaaataattccttgtcaataatagaggcattgaattgaagcttctctgtgttgttctctttttaccgccattagccgggcttaagttgttgctcttttataacacaatttgttcgttggactatccaacgattagcaccattttttcttctaacaagttttaaataaattctgtaaccatagatctgacagggagaccgtgtcattcaaggaatatgggagataaggaagagacttttgatgatgcggtagaggagagggtaatcaacgaagagtataaaatttggaagaaaaacacacctttcctgtatgatctggttatgacacatgctctggaatggccatcccttacagcccagtggcttcctgatgtaacacgtccagagggtaaagattactccatccacaggcttatacttggcacacatacctccgatgagcaaaatcatcttctcatagcaagtgtacaacttccaaatgaagatgcccagtttgatgcatctcattatgacaatgaaaaaggagttatatctttagaatttggaggatttggttcagtgtctgggaaaatagagattgaaattaaaataaatcatgaaggagaagttaacagggcgaggtatatgccccagaatccgtgtgtcattgcgaccaaaactccttctagcgatgtacttgttttcgattacactaagcatccctccaaacccgatccaacgggagactgccatcccgacctcagactgcggggtcatcagaaagaagggtacggactctcttggaatccaaacctgaatggctatcttctttctgcctcagatgaccatacaatctgcctttgggatattaatgcgactccgaaagagaatcgcattatcgatgctaaaactatcttcactggacacactgctgtagtggaagatgttgcttggcacctgttgcatgagtcattgtttggttctgtggctgatgaccaaaaactaatgatttgggatactagatctaacaacaccagcaaaccatcccataccgttgatgctcacactgctgaagtcaattgtttgtcttttaatccctattccgaattcatattagcgactggtagtgccgataagacggttgcactttgggatttaagaaatttgaaactcaaattgcactcatttgaatcgcacaaggatgaaattttccaggttcaatggtctcctcataatgaaacaatcttagcttcaagtggaacggatagaaggctccatgtgtgggatttgagcaagattggagaagaacagtctgctgaggatgcggaagatggtcctcccgagttactctttattcacggaggacacactgcaaagatatcagacttctcgtggaaccctaacgaaccttgggtcatctgttctgtatcagaagataacatcatgcaggtctggcaaatggcagaaaatatatacaacgatgaagaacctgatacaccggcatctgatatagatgctccaggcgctgcgtcgtaaatacttgtacctgtaaaaatattttttaaaatggatatcctgactttttagataatacggtcctttttatactatttattacaaaaacaaaaaacttaaaaatggtacatagatagctctggggtgtgtgttccattgtttcatttaaggactgttgttgaaaaatttgtaaaaactaagatattcttttttattccatgcaattgttatctgtttgggctatttttttttctttttaaaatgttcctaaaaaaaagagaaatttttataaaaaaaacttattagaataaaacagttggcccattcgtttatatttcttttcatgttgaagaacgtttctagtagttacttatattcttaataaatgttaaggttaaat

SEQ ID NO: 335 - DNA, 4265 bp, Nezara viridula
tcctccccaaaaggctgcgggcatgatgtaaattattaccgaatttcggaatctaatcagaaaataaattagaatttttcaaaactgcgacgaaaacaaaaaagttatcaattatcgaactagtgccgctctctataagccctaatcaccccaacacttggtttaggaggtaattacaaacggtttttgttgtgaagtgtcgtgtttaagataaattttttctatttgaatgtaaaaatgtggtattttatacatttttggggaaataaattacgcccgaataattggtttaataattacatggtaatttattcgactgacttcattgaaccacttttggccgactaaaattcgattgattagacttattgttgaatatttatttaatttattcttcatcatgtatctacttaatacaagagacagcaatgcaaattgcagtcataatgattatattaaaagttttctatcacatgacaactttttttattgttgtaaaataattgtttcaaagtggttttatattctgtttactaatgtttgcaatggatatcgtttgtgatgtagttcctgctaaaagaaataagagctgtggtgattattcatctgttaatgatactttacctgtttacaatctgaaatatgaagagcgtgatcttcaagaaattgtagttgatactgaagttcccgattatgttggtaaaactcttattcatccttttaatctccattgcatgctgtgtaataaaacatgctgtgatgaaacgtccgtgtttactcatataaacagtcctaaacatttgatgcacaattggaagaaaaaggaagctattgggatagtcagtaaagaattcaacacatttatactgtgctgtttgtcagatttgattgcctttgtacatgtttattataaaacccatggattgaatgaaattgttgttgctaatagagaatttattttttctgaaaatacggaccaccatagtggtaatgcagaaacaagcaataaaatagttgtcacttctccaaggttcataccaccggtcgagaattcagtgtattttagaataattgtagatcgagaagattctcaattattttatgaaagcagagctgctagatattcacatctcactggtaatattgttattgaaactaaaggtagtagttatccgaaaatcgcttacatatatgaattattcaacaaaggaataccttcttgtggaccgctgtttgttgacttacttgaatggtgttctgaaaatatacctccctcaactgttgtctggtgttctctttgttgtaaaagtatatcaattcagtgtttacgctatcacttatctgaagatcacacagtttctaattcccagtttttatatgcgttgatgtgtcataaatgtgaaacattttttcttattgattatggggataaaatgcatcatgttcacaataaagggattacaaaaaagattttgagaaatcaattaaacaaaaaattcaatgctgtacatttgatgccggacatttctgcagaagcaatcgagatctacatgaatgatttccaaaaaagatataacctgaaaaaatctgacttgaagtttgagtgtttgctatgcttttctccattagtaaaacgttttactgaatttgtgaatcatttgagagaatcatcacatttggataaactagtgcaagaaagtaggaaattcactgctttttgtgatgcatgtaatattattttgatagctcagaatgttaatagactttttgatcactttgaagtacataagtcaattttaaacatgagtgatagcattgaagattccccaataatggctactagtgatattgatgtcacaatgcaaactgactctaataactgtgctgagtcgactatcatatacccaaaagtagcaaatttcagtgaatctgcttttcagtttactaatccaggagttcaagatgattttactgttactagagatatgactattgaaaatattgaagaatacattgaagaaacgttttattcgatttattcagatctcaaaaagatatattttgcctgtttgaactgtacttcatctagaatggataaaagatcattttttaaccatttaaaaaatagaaaacaccttatgaaagtgcgtccattctcagatttaattttctttgttaaaatatgtgatatttgtcaaatgtttctgttgggatctcatattgaattagtgaagaagcactttacctccactgatcataatcaaaatattaagtgtagaatggagttcatcaaacgacagtatgttgatagctcagggaagatgaagttaggatggtctggtaagctgacagacagaagtgtggagttattttcttctaaagaagggttaaataaccatattgaatcctgtttaaaagaagcagtagaaatttggcaaagtgcttcatttgttcatggaatgctagatagagatataagaaagacattagagccaatctgtggtcacatagatgttaaattttttggttcaagaatctatggattagctcagcaagatagtgatgtggatatatgcattgatggtgcgactattcaagatttagagcaaggattttctaaatcaatgagtttattttgtgttaaagaaatcatcaaagaagctaaagttcctatcataaaagtaggacacatatatacctctctagactgtgatatcaactgttgcgataccggtgcagtgtataattcagaacttgttaaagtatacatagctttggatcctcgagtgcagtggctattaatggcagtaaaagaatgggctgccattaattatatcagaggatctcagaaattcaccagttacggattaatttggctagtactctttttcttgatgcaacctgatatttgtttggttcctcctgtgaatcttttaaaaagcctttacaatggacctaaaacattgattaatgggtggaattactcattttcaaaccacattgaattgattaagctccaccataacccattggcttgtcaaaaaaacaagtatgagctccttcttcacttctttcaatattatgccatgttgaaggcaaagagggttgtgctgtttcctctgactggagaagtctatccacgatctatgctcgccaacacggatctgtgtatctgcccagaattagcaatgaatacggaggatacagaacctgtaagaataggtgggcagtttgtgctgttagattgttttcgtttgcgatacaatatcttaaagaatgtagaggagaacctggcggatcattttaagttgatatgtgcgaaaacgtatgagagtagctcctggaggtcttagatatctgcttctaatgaatgtggagactccatgagtttttactttctgccatataggattctaaatggtatattgacagtaacaagagaaaatgtaggaattacattaaagtaatttaaaatatgatcttgttgactaatctatttgataatttaagttgaaaaatgttttttttgataactttgccattaggataataatatttcctgttacttggtaaaatatttttaaagttttaagtttgtttttagaatagctattgacttgtcacttgaattaggtgactatatcagtttatttttcaaattaagaaaaatgtcctacaatatattttttcttgtattgtgaaatattttctattgattagaagctttaaaaggctagtacaaaaaccaattggagaaacaatttgcctttaatgcagaataacagtaatttcaaagtaaaataaatttgtctaatatataacaaaacaggtatatatatcgtgaatgttattttaataaaaaaatcagtgagacatatgaggaactaaatgtttgtttttttatctgctgcacataagcagttttgatgatgctacaaaaatcttttctgaaaaggaaaagaagttggtaaattggctccatctccaaatttttattattttataatgttggattgttgaagagtgtgaattttttattacatttgctttatgtattattttaaatatgcattttataaataccaatggtctttcaagattttattctttaattttagtagaagtggtagatagtttagtcaaataccaagactgttgattgcaattaagttacctttagttaattttttaatattttatgtttgtttcaataattttttgtagtgaaatttttgtagtgtttagttcctttaacttaattttgt

SEQ ID NO: 336 - DNA, 1476 bp, Nezara viridula
ttcagatagaaacgatagaagaagctctggtggtagaagccaaggcagatggggatcaacaggcccctctgatggagactcgttcaacagagaaccaaaacacccggctgttccctttgaaaagaatttttataaggagagcaccaaactgtcagacagagaagtcgaagacttcagaaggaagcacgagatgaggacctcgggaaatgtcccacagccctttatagactttaaagacacaccattctccaaggagatactcgattcttttgctaaaaagaattacacagcacccactcccatccagtcacagggatggccaatggctttgacaggacaagacatggtaggaatagcccagacgggttcaggaaagacattgagctttgtattgccggctttgatccatgctagagcacaagagccattaagacccggtgatgggcccattattttggttttggctcctacgagagagttggttcttcaaattaaagatgtgtttgacgagtatgctcgttttttcaacatgaaggctacggctgtgtatggaggagtgtcttcatacaaccagaagagagacatcgagatggggtgtgagatagtcgttgcagcccctggcagacttatagatttgaatgagcaaggcgtatgcttcttaaaccgagtgagtttccttgtactcgatgaagcagacaggatgttagacatgggattcgagcctcagatcaagaagatcatagcccaaaccaatcccgacagacagacactcatgtggagtgcaacatggcccaaggaagtgaagaggctcgcagagagttacatgaccaactacttccagattacagtaggaagtgaagacttaaagaccaataagaaaatcaaacaggaagtatttgtaattaaggaacacgagaagaacgatacccttttagagacgctcagggagagaaagaatgacaaagccattattttcaccaacaaaaagagaacatgtgatgatttagagcatctcctctaccgaaatggcttcaaggccaaggcaatacacggagacaagtcccaaaacataagagacagcatcatagccgacttccgatcaggatataagaatattctcatagccacagatgtcgtaggaagaggactggatatcaaggacgtgtcgattgtgataaactatgacatccccaacaacatcgaggactatgtgcaccgtataggaaggacagccagaggagacaccctcacaggactatcgcattcttttgtaacaattgagaacagaggagtagtaagagacctaatcaagatgcttaaagacgcaaatcaggaggtaccccccaagctacttgacttggcttcccagccctcatacggcggaaggagcaattcaagatacggatatggtggaggacaatctagaaactatagggattattactaaagcttattaaatttattttgattttaaaa

SEQ ID NO: 337 - DNA, 1553 bp, Nezara viridula
gaggtggacgcggtggtggcggtggctctcgttatgatgacagagttgacttggtcgctccacaatgggacactgagtccttgcccaagtttgaaaaaaatttctatgcagaacacgaaagcgttacgaaccgttccgacgctgagattcttgcattcagaaaggaacatgaaatgagctgtgtcggtacggatattcccaagcctatcactgcttttgaagaagcagggtttcccgactatgtgttgaaggaattgcaagcccagggcttccctagccctaccgctatccagtgccaaggttggccaatggctctctctggaagagatatgattggtattgcagccacaggttcaggtaagactttgtcgtactgtttgcccgcgatcgttcacatcaacgcccagcccttgcttaagcccggcgatggacctgtggtgttggtattagctccaacccgtgaattagcggtccaaattcagacagaatgctccaagtttggtgcttcgtctcgtatcagaaacacctgcgtgtatggaggtgctcctaaaggacaacaaatcagagacttgtcgcgtggtgtggaaatttgcattgcaaccccaggtcgtttgattgatatgttggagatgggcaaaacaaacttgaagcgagtcacctacttggtgttggatgaggccgacagaatgttagacatgggattcgaactgcaaattcgcaaaatcgtggatcagatcagacctgatcgtcagactttgatgtggtctgcaacatggcccaaggaagtacaagtcttgacgcgtgattacttgaatgaccccattcaggtcactatcggctcgttggagttatcagcatcacacaccatcacacaagttgtggagattgtcactgaatatgaaaagcgcgatcgtctagtgaaacacttggaaacggcgaccgctgacaaggagggcaaggttttaatctttgcttctacaaaacgcatgtgcgatgagattaccagttacttgaggctggacggatggcctgcgttggctatccacggtgataagcagcaaagtgagcgtgactgggtcttgagtgaattcagggctggaaagtcgcccatcatggtagccaccgatgtggctgcgcgtggtattggtatgttatttttaaccacccctcactatattactaactgacggacacgcgaaaagtagagatttcgaaagaatgatcgaaaatgaagataacgctacagagttttatggaaagaaggcgactgcgctggtcgcatgtcgctactcttttctttctctgaatcccaaagagagattaacgcagaaatggcgaaatggaaaatatacgaaaaagcacaagagacctttggtacatgtccctattgatcgaatgaccctttgtttttcactcacaatgcaagaaatcagccttttacattttttttttgcgattttgagaaacaaatgcccccatgacttacgatcgaagcgacaaatcgacctgcttttctgtatattttgtattttgtaatataatgtattttcttt

SEQ ID NO: 338 - DNA, 1975 bp, Nezara viridula
tacttgtttctgttttgtaaatacttattttactatgattcttagtaatacgttacaatataaaatttaactttctatttcagagacaatatatttaggttgtacaagaataaggttcctccataataggatctgatcctactctcttcaaccttagtcttttgaaatattgtcttacaaaagtgaagtataagggaaacttgttaagaaggatttgaaagcatttttagtattatgtaagtttatttccctacataaaagacctacagaagctattataaaaaaaaagatgaatatgaaaatgactactcttcattctatgggaattacaatgaaagttatggtagcttttgcgatgggttagaagctgtttcttgggagaaccattccctaccagattttacaaaaaatttttacatcccacatccaactgtgttgaatagaccttatgctgatgtacagcaatatagagaaagcagaggtatcaaaattgaaggagatgctgataataataacaatccaatcatgtattttgaagagggcaattttcctgactatgtcgcaggaactatcaaaaaaatgggatttgatttcccaactgctattcaagctcaaagttggccaattgcattgagtggaaggaatatggttggaattgctcagactggtagtgggaaaacactagcttatatgcttcctgcagttatccatagtatcaatcagccaagagtacagcgtggagatggtcctattgtattggtgttgacaccaacccgagaattagctcagcaaattcaagcaacacacatacaaatagccaaaccaggcagccaaaaagatgttgcgacaacaggaacaaccaacaaaagaacacaaactaaagaggtacagaatgaagcagacatagtaatagccacaccaggtcgccttatagattttttgacaacaggtacaaccaatctgagaagatgcacttatttggtccttgatgaagcagacagaatgttacatatgggatttgaacagcaaattagaaaaattatgcaacaaattaggcctgaccgtcaggtacttatgtggtcagctacttggcccaaagaagttaaatctctagctgaagatttccttcaagaatatgttcaaattaatataggatcattagggttgtcagcaaaccacaatattcatcaaattgttgatgtttgtcaggaaaatgataagcaattaaaacttcataatttactagaaggaattggaaaccacaaactagaacgaacaattatttttgtagaaaccaagaagaaagtagattcaattactaatgatcttaaaaagattggttggccagcagctagtattcatggtaataaatcacaaaaggaaagagattatgttttaaaagaatttagagatggtaaatcacttattcttgtagcaacagatgtagcagctcgtggccttgatgttgaaaatgtcatgtatgtgatcaactatgactttccaaaaagttcagaagattacattcataggatcggtcgtactggccgatcaaattcatcgggaacagcttatacattctttacctctgctaatcaaagacaagctaaggatctaatatcagtattagctgaagctaaacagcaaataactcctgaattacaatccatgatatggtttaatggtcggagaaatgctttttcaaatgggtacaagaacattgcacacaaggactcagaccagttggtttaccttgagaatccaatagatgatttatcatataaaactagtgaggctactaacagctgtaacaattactactgaaattgtttacacacctcataattgtttaaactaaatatatttgtaaaactattgtcaattgttctaatgtcaatttgacaaaaatatgaagttagttttttttttattttgtaatacaccatttatttccacaataaaacagattcaaatgcca

SEQ ID NO: 339 - DNA, 1564 bp, Nezara viridula
agattgatgttaatataggaatttcattatatgaatgttctgatgggggtgttttttgtattcattcaattcttgatgttatgttttgatttggagagaggagtggaaatagttattgccacacctggaagattaattgatttcttaacaagaggcaccataaatcttagaaggtgtacatacttggttcttgatgaagctgacaggatgttagacatgggattcgaaccccaaattagaaaaattatgcatcaaatcaggcctgaccgtcaagttcttatgtggtcagcaacatggccaaaggaagtcaaagcattagctgaagattttcttcaagattatgttcaggttaacataggatcacttgagcttgctgcaaatcataatatcattcaaatagtagatgtttgtgaagaaggggataaacaatccaagcttaacaccttactagaagaaattggaacccaaaaactcgagaaaaccataatttttgtcgagaccaagaagaaagttgagtctattgctaatggtctcaaaagagttgggtggcctgctgtatgtattcatggtgacaaatcacaaaatgagagagattatgttttaagagactttagacgaggtaaatcattgatcctcgttgcaacagatgttgctgctcggggactagatgtggaagatgtaatgtatgtcatcaattatgatttccccaactcctctgaagattatattcaccggatcggacgtactggacgatcaactgcctctggtacagcctataccttttttacatctgcaaaccaaaagcaggcccgagatcttgttgctgttctagccgaagctaaacagagcgtttctaacgagttgcaagccatgaccaggttctctggtggtggaagtggatatgccagaggaggtttcagaaacggaaagttcaacaaacgtactgataataagtttggtggtggcagccgtttcaatgctggtttccagaggaattctaccatgtatggtcaaaaaccaagtacctttcgaagatttgactaagactttattccatataaaaaaaagtttttataatctcttgtaattattaatgtaaaaagtaaaaaatggaggaagaaagagaaattagtgtctgaatattacttatgtgacttggaagggaggggctttgaggagataatttaaatctatatttccaagaaggcttaacatttttgttgttagtcattgttttgatagggtgcaacccttactacccataatgccctctatggctagtttatctcttaatgtaaatacttaataaaactgtacctacctattatttaattttctattttatatgttatgttaggaaatattaatttatcacaaaatggctcgtctgagtctccttttcgatgtgatatttatttatacaatacgagttgtattttttaagtattcatatcaccttagtatttttatatttttctgcatcagtattatttataattttaaagtcatgttctgttgatgattttaaaagaggagtaattttcaataaatgtttatgaaaaag

SEQ ID NO: 340 - DNA, 2321 bp, Nezara viridula
gcttaagccaaattttcttaggaaagttgtggtaataagtatattaagctataaagtcactcacctgctttttcatgagttgtcctggaaacaagaaaaatatatctatcatcaggaaaaaattttctctcgccatgaagaggccaccatctcaaattcaatttaacataagtactaaaagacaaagacatctggagggacctcgccccagggagatatctattgaaattcagcgaaaaacattgcctatacacagagtgaagaggaggcttcttatggaaatagagaaagcggaaacagttatattattaggagaaacaggctgtggtaaaaccacacagatccctcaatacttgctcgaaagaaaacttaatcgtgatggtatcatcggaataactcagccaagaagagttgcagctgtaacagtggcgaatcgagttgcggttgaaatgaaaacatccactggtcaagcagttggttatactgtacgatttgaagatgcaacatctcctctgacaaaaataaaatacttaactgatggaatgttattacgagaagccatttcagataatctactaaaggcttataactttattattcttgatgaggcccatgaaagaacaatccatactgacgttttatttggtatagtaaaagaagctcaagccaaacggaaatctagcaattgcactcctcttaagataattgtgatgtctgcgacgatggatgttgatcattttagtaaatattttaatgatgctcctgtaatttatattgaaggtcgtcagtacccagttgaaataaatcatgctgtagaatcccaagacgattacatttattcttgtttagttaccatttttcaaatcaacagagaagccccacccaatcatgacattttggtattcctgactggacaagaagagatagaaactatgactgctaatattcgtgccatagcaaaggatcctctatttagcggtccgaacatcaaagtttatcctttatatgcagctttggcagctagtaaacaattggaagtttttcactctcctcctccgaatactaggaaagtagtactcagtactaatattgccgaaacatcagtcacaattagcggaattaaatatgttattgatagtggaatggttaaacaaagagttcaccattctggcacagggttagatgtattaaaggtccatagtatatctcaagcacaggcgtggcagagggcaggtagagctggaagagaatcccctggatttacgtttcgtgcctacacaaagtccgaatttgattgcatggtcaaaaatactgttccagaattattgaggagcaatttatccaatgttgtactgcaattattggcactgaaagtaaatgctttaacatttgacttcttggataaaccacctaaagatcttatattggaagcttttgaccagttaaaacagcttggagctatagataattttgatgatgcccagttaactccgcttggacagaagatgtctcttttccctctggatccaaggttcagtaaggtcttactggaagcagaaaagtttggctgtgttgaagaaattctcagtatagtagctctactttccggagaatcagtttttgttaataacattgctaaaagagaagaagctgctgctgctagagaaaagttttcaacttcggcaggagaccacatcactctattgaagatatttagggcatacaattcgatcaacaccaaacatttgaaacatcggcaaaaataaaaaccttggtccatgaaacctatggggtaaagaatcaaagagacaaactctgatgaagacctaagggcatacaattcgatcaacaccaaacatgcctggtgttatgaaaacttttttaatagtcgtaatttggactatgcaatgaaggtaaggaagcagctttctgatctttgtagaagatgcgatatacaaattaaatcttgtaaccaagatttcgacaaagtaagaaagtgtttaattagtggtttcttcatgaatatggcagaacttcaaagggacaagaaatatttaacggttggttcaaagcagctggttcacatacatcctacttctgttttatctggttctctgccacaagtggtacttttcacagaattggtacaaacaagtaaatgttacatgcgttacataacgccaatagattcactttgggcggatgaaatcaaacctaaaggtctaacgatctcaggtttttcacaagttgactaaatgaccatcagccattacgataaaaattgttttttaatcacaatgatgtatatactgattttattc

SEQ ID NO: 341 - DNA, 2532 bp, Nezara viridula
ctgtgcctagaggaatattaattattgttttttgtaactttgtttgccttaataaaatataagctattttcacgccccgaaaaatgtctaaacgtcggattgagtatattgatccttatgtaacaaaacagaggatggcagctgttccttctactagtgttacatcgacaacaaatgttgctcctccagcagccaatacattaaagaatagtacatcaaaaaatccatttactggtcttccttataccaggagatactatgagttttatagaaagagaattcagcttccagtctttgaataccgtgatgaattcatggatcttttgcacaaacatcagtgtattgttcttgttggtgaaactggatccgggaaaactacccaaatccctcaatggtgtgtggaatattcgctgagtgttggatcaaaaggtgtagcttgtactcagccgaggagggtcgcagctatgtctgttgcgcaaagagtttccgaagagatggatgtatctttgggtcaagaagttggttacagtataagatttgaagactgttcatcagctaaaacagtattaaaatatatgactgacggtatgcttcttcgtgaaggcatgtccgatcccatgcttgaaaattaccaagtgatattattggatgaagctcatgaaagaacattagctacagatattcttatgggtgttcttaaagaaattattaaacagaggtctgatctcaagctcgttattatgtctgccacccttgatgccggcaaatttcagcaatactttgacaataaagaaattattaaacagaggtctgatctcaagctggtgattatgtcagccacccttgatgcaggcaaatttcagcaatactttgacaatgctcctttgatgaatgtacctggaagaactcaccctgttgaaatattttacactcctgaaccggaaagagattatctggaagcagctataaggaccgtcatacaaattcatatgtgtgaggaaattgctggtgatgtacttctctttctgactggacaagaagaaattgaagaggcttgtaaaagaattaaaagagaaatcgacaatctgggccctgaagtcggagaactaaagtgtattccactttattcgaccctgccgcctaaccttcaacagcgcattttcgaacccgctccacctaacaaacccaacggtgctataggaaggaaagttgtagtgtcgacgaacattgctgaaacttcacttacgatagatggagttgtttttgtgattgacccaggattcgcaaagcaaaaagtatacaatcctcgtatcagagtagaatctcttctagtttcgcccataagtaaagcgtcagctcaacaaagggctggtagagccggaagaacacgacctggaaaatgttttaggctgtacacagaaaaggcttacaaaaatgaaatgcaagacaacacgtatccagaaattctcaggtcaaatttaggatctgtggttcttcaattaaaaaagcttggaattgacgatcttgtccattttgatttcatggatcctcctgccccggaaactctgatgagagctttagaacttcttaattacctggcagcgttggatgacgacggcaacttgaccgatctcggagcagtcatggcagaattccctctagatccacagttggctaagcttctcatcacgtcgtgtgcgctcaactgttccaatgaaatcctctctatcactgccatgctatcaggtgatgttactaaaaatggtacgcgcgtttccgtgcgatctcagttccgcagtgtttcgttcggccgaacgaggcaaagaaggctgccgatgatgcgaagatgcgctttgcgcacatcgatggggatcacttgactcttctcaatgtttatcacgcctttaaacaaaactcagaagacccacagtggtgctatgacaatttcgtcaactatagatctctcaaatccggcgataacgtgaggcagcagctatcgaggataatggatcgttttaatttgaagaggacctcgacggagtttacatccaaagactattatatcaacatcaggaaatcacttgttactggtttctttatgcaggtcgctcatctagagaagacgggtcattatttaacgatcaaggacaaccaggtcgtacagttacatccttcgacatgtttagatcataaacctgaatgggtcgtctataatgaatttgtacttacgacgaagaattatataaggacggtgacagatgttaaacctgaatggcttttaaagttagcgcctcaatattatgatctccagaacttccctcagtgcgaagcgaagcgtcagttggaaatacttcaagaaaggctcgattccagacagtatcaagaagatatatattcttatatatatatatttagtaaataatatatacataaggatatatatatatatgttaggactctccctcacttactcatgcactcctcactctcctattttctttagaaattctcagttctatatttaaagacctg

SEQ ID NO: 342 - DNA, 433 bp, Nezara viridula
acaaaatgacaaagatcacgaggtaacagagttaaaatctgtccgtcaactgctcccagtgtacaagtaccgccaagagttcttggacgccgtgcacgcgcacccggttctcattgtgataggggaaaccggatccggaaagaccacacagctaccacaatatcttcacgaggcaggatacaccaaagcgggaggtgggatcaattcggttgtgggatgtacgcaaccgcgccgagttgcggcaacgtctgtcgctgcccgtgtttcgcaggaattgggtgtcaagcttggctctaccgtgggatatacaattcgtttcgaggattgctcagggcccgaaacggttgtcaaatacttgacagatggaatgcttttgcgggaatttcttaccgatcccgaactttcacggtacagtgctataatgatcgacgag

SEQ ID NO: 343 - DNA, 1137 bp, Nezara viridula
aaagaaatgcaagaaaatttacctgtcttcaaattcaaagaacagatagttgaagcagtgaaaaacaataaggtaacaataattgctggtgatacaggttgtggtaaatcgactcaagttcctcaatatttgttgaatgctggttttgagaaaatcgcatgtacgcaaccaagaagattggcttgtatttcgttatcaaagagagtttcttatgaaacaatgaataaatttggtgaacaagttggtttccaaatcaggtttgaaaaaaatcgaaggaaagacacgaggattatttttattactgaagggttgttacttagacaggtaggcagtgatgggcttctttccgagtatgatgtcattcttctcgatgaaattcatgaaaggcatcttcaaggagattttttacttggtcttctgaaatgtgtacttattcaaaggcccaccttaaaactcgttctgatgtctgctactatcaatattcctctatttgaatcctattttggtgaagaagctgctaccatacaggttcctggaagagtatatccaatatcagttaattacatgcctacaactccagctgaaataaaagcggaaagattagacccagggccatacatcagagtaatgcagatcattgataagaaatattcaagtaatgagagaggtgacttactaatatttgtgagtggaacaaacgagatcaatacggtcatagatgcagcccagagatataatgagaagattaacaaatggattatacttccactacacagctcactttccattgctgaacaagacaaggtatttgattacgctcctgatggcatgcgtaagtgtgttgtttccacaaacattgctgaaacttcgattacattagatggagtgagatttgttatggattcaggaatggttaaagaaatgtcatatgatcctgttttaagggtgcaaaggctcaaagagttccctgttttaagggtgcaaaggctcaaagagttctgggttagcaaagcttcagctgaacaaaggaaaggaagagctggaagaactggacctggtgtttgttatagactctacagtgaagcagattttagtgcaatggcagattataccaccccagaaattcagcgtgtgctt

SEQ ID NO: 344 - DNA, 1282 bp, Nezara viridula
cacaggatttatttccaatgacagttttacggaagaacttaaatttgaagtcgatgttccaggagagtacccacgaagcggttatacagtcgagtatatctggaggggtgtgtgttatgaaagaatgctttgggctttgaacaagttacatgatactcataaaaagaaggcacccgaggaggtttctatctttgaatacattttaaaaggcaagaaagagcatctaaaaaacgtagacgacattttaatgagtcctaacctcccaaagctaaacaagttccaggaaatagcagttaaagccgctttgagtagaaaagtaacgctaatccaagggccaccgggaactggaaagactttggtctctgcatctattgtttataattacgtcaagaaattcaaagggaaagtgttagttgttgccccatcaaacacggctgttgaccaactgactttaaaaattcataaaacgggtctccgggttttaagagtaatgagtagaaggagagagtacacacagtcagatgtaaatttcctctctctacacgagaatctaaaagaattacaagaaatgagtaagtttaacggcagtactattgatgatgccagtgacgatgagaatgacaacatgaagagaacactcctctcacaagcggaagttatcacctgtacttgcgttacggctggacaaaaactatttaataaaatgaagttctcctgtgtgcttgtcgatgaagcagtacagtctactgagcctttaaacataatccccttggtttatggctgcactaaacttatcctcgtaggagaccacaagcagttaggaccaaccattttatcaaaaaaagtcgcaaagagcgggttcaaacaaagtttatttgaaaggcttctctctatcggcgtaagtccctatattttgtcactgcaatatagaatgcacccagatctttgtgaatggccatcagaaacattttataatggcgagctacaaacaggagatagaacgttctttaaatttaatcttgggattccgttgaactttttctattcgtgttacggaaaagaagaggttagtgctagtggtacgtcctttattaatcagatggaggctttgtactgtgaaagtattattaggcatctttttaagtcgggtataacggaaaaccaaataggagttatcacgccatacgaaggacaaagatctcacattttaaaccgtatcttcggaagcgagccagggaatctcgagataagcaatgtggatggtttccaaggaagagagaag

SEQ ID NO: 345 - DNA, 988 bp, Nezara viridula
aaactagtgaggatttttaactagataattctgtatcatctcaaactctaatcactaataagttaattatggaaggaatgagttttgttactgttttggaacaatatctaaagatcctgaatttatattcaacctaccaaatggtccctaaagacaatgcccgacaacgctcaataagttttcaattgaccgtgaatgatcaaacagtaacaggagtgggaaaaacaaaaaaagaagctaaggagaatgcagcagaagtgatgtataatttattgattgctgaggagaaagaaagagctcaaaaggatttcaatgaaaacaacaaagaacctgttgaagctttaattcagttgtgttcccaactttctcttggtatgccaaagtttgaatataaaagcagtgatatattctcgcactctacaatttatactgttagttgcattgttttgggggttagagaagaagtaagaagctttagaaaggataaggcaaaaaaacaagtagccaatgcaatgtttttgaaaataaaagaacaggaaaagatttctgatgacttttcaagattaaaggaagaagaaatgagaaaaaacgattctttaagattgcctaatgcaagtcataattttaaagcagcgaaggatttgtttgataaggttcgacatcagcaattagctgagtatctaaaaaaatcaaatacagcttatgatctaaagatgaaacctgaatctgaaatttataaacttaaaaatccggaaggtgtttttcaaagaattatgaaagaaatagaagttgattataaaatattttttcaatttaaaaaccaagaatggttttgttgcattgaaatgtttccgataaattacatcgtaaagacaaaagataagaataaatccagagctggaaaatgtgccataataacttcattaagatacatgcatgaaaaatatgtattatgattacacatactcatgtattatatgatatacaa

SEQ ID NO: 346 - DNA, 1311 bp, Nezara viridula
cctctttgccgtccatacgcctgctctaataactcattgcccagtatgtctgaaggaatcactgagattgactccaataccattgagaccaactacgatcacgtagtatacaagtttgatgacttgaacctcaagccaaacattgttcgtggtattttcggttatggttacgatgccccatcggccattcagcaaagagccattttacccattaccgaaggccgcgatgtcctcgcccaggcccaatcaggtaccggtaaaactgccactttcaccatctctgcgttgcaaaatattgatgaaaactcaaagaccacccaggccttgattcttgcccccaccagagagttggcgatgcagatcaaaaacgtagtcactagcattggattgtacatgaacgtaaccgttcatgcctctattggtggtacttccatgtccgatgatattgaagcgttccgctctggtgtccagatcgtggttggaactcccggaagagtttacgatatgattgagagacgctacttcaagactgacactgtcaagatgtttattcttgatgaagccgatgagatgttgtcgtctggattcaaggagcagatttacaacattttccgtcttcttcctgaaaccacccaggttgtcctcttgtctgccaccatgcctcaagatgtcttggaggttaccacaaaattcatgaacaaccctgttcgtattcttgttaagaaggatgagttgaccttggagggtattaagcaatactttgttaacgttgaagaagagcaatacaaattcgactgtctctgtgacttgtatgatgccatttcggtcacccaggctgtcattttctgcaacaccagatccaaggtggagtttttgaccacccagttgaaggaacggaaattcactgtttccgcaatccatgctgacttacctcaaggcgacagagacaccatcatgaaggagttccgtacaggttcttctcgtattttgatctccactgacttgttggccagaggtatcgatgtccagcaggtttcgttggtcattaactatgacttgccttccaacaaggagaactacattcacagaatcggtagaggtggtcgtttcggtagaaaaggtgttgccatcaactttgtcactgatcgtgatgttggaatgatgagagagattgaaaagttctactccacccaaattgaggagatgcctgttgaagttggtgacttgatcagtgctcagtagagatgtggagttgtatcatgggtttgcaggttatagccttttttactttaatccaaaagcttgttaaat

SEQ ID NO: 347 - DNA, 1215 bp, Nezara viridula
gtagacaattcaaattttgaagacgatagaaagtacatgacagatgtaaaattgtataacaggtgggaggagtacaatttagacgccaatctcctgaagggcatctatgcgatggggtttgaaactccctccttcatccagaaagctgctatcaagccgattatcgatgggtgtgatatcagagcccaagcacagagtggaactgggaagaccggggcatttgctattggtgcgctgcagtccttggaccagaaagtgcaagcaccacaagtccttgttcttgtaaacacaagagaggtggcagcacaaaatgctaacagatttattgacttctcgaagttcatggacgtcaacgtgtgtcttctagctggtggtaatcctgttcctttggacatcaagcacctttctaccaaccctcaagttgttgttggtacaccaggaagagttgagcagatgatccaggaagggtatttgaagacagagcatatcaagctgtttatcattgatgaagccgatgagatgcttcaggctggcttccaagagcaggtgagaaacatctttatggcactgaatagaaaaacaattcaaatcgctatgttttctgctacttacgaagaagaagaacttgctgtttcagaggaaatccttaagaacccaataattatcgatcttaggcagagtgaacaaactcttatcggtatcaaacaattccttatcgagattggaccagacaactctatgaggaagaatgacatgacgcttaagctcataacacttgttgatctttttaaacgtcataaatttggacaaaccgttatctttgtgactgctaaggcgggtgcaaacttcattcacgatgggttgaatgccgagggcatcccctgtgaagtaattactgcggataaggctcaaactgagagggaagaggtgttggagagattcagatcgggaaagaacagaatccttgtctcatcgggtcttttaagtagagggattgatattcaggacttgtctgtcgtcttctgtcttgatgtccctccaccaaataagaagagcacgtacatccacaggattggtaggtctggaagatacggtaagaagggtatcgctatcctcgttttatacgaacatgaaatcccaaaccttagagaaatcgaaaagttttacaacacaaaggtaaaggaattctcacttaattacttaactaataattaa

SEQ ID NO: 348 - DNA, 2813 bp, Nezara viridula
gaaagcttttttcactatcttatttgattgtgactgtttttttgagcattagtctagtttattgtatatagtaatgatgtattataattgcttgtttttcagtagaaatttccttacttcattcggttatttctttcgtctcgtcatgtgattaaatttttattggtttttcttgattaaaatgctcgtttacaaatttaaatataatttgcgcgcatgggtacaagaaccacagttcttcctgtcttagtcctttccatagcaaatacttgagtggaacatgtcggtaacgtcgtctgacaaaaggaatgaggattgggtaggagagtctaaaaatgggccaagcgacaaagaacattcttatgatggtccacccggtatggaccctgaaggaatcatcgagtccaactgggacgaggtggtggacaattttgatgatatgaaccttaaagaagaacttctgagaggtatttatgcttatggttttgaaaaaccttctgctatacaacaacgggcaattatcccttgtgttaggggtcatgatgttattgcccaagctcagtcaggtactggtaaaacagctacattttccatttcaatattacaacaaattgacactagtgcaagagaatgccaggccttgattttggccccaactcgtgaattggcccaacagatccagaaagtagtcatagccctgggagattttatgggggccatgtgccatgcatgcattggtggtacaaatgttagagaagacatgcgcaaactagaaatgggtgttcatgttttggttggaactcccggacgagttttggatatgattagccgcagagctctaaaaactaacaccattagaatttttgtgttggatgaagctgatgagatgctttctcgtggtttcaaagatcagatccatgatgtatttaaaaatttaaatcatgaagtacaggttatattgctttcagctactatgccatcagatgtattggaggtcagtacatgcttcatgaggaatcctattcgtatcttagttaaaaaagaagaacttaccttggaaggtatcaaacagttttttgtttttgttgagagagaagagtggaagttggatactctctgtgatttgtatgaaacactaagtattactcaagctgtaattttttgtaatacaaggcgcaaggttgattggttgactgagagtatgcataatagagacttcactgtttctgctatgcacggtgatatggaacaaagagaacgagatattattatgagacaattccgtactggttccagtagagttttaatcactacagaccttttggcaagaggcattgatgtgcaacaagtttctcttgtcataaattatgatcttccatctaatagagagaattatattcacaggattggaagaggtggccgatttggtcgtaaaggtgtggcgattaattttgttacagaagaggacaaacgctctcttaatgatattgaacagttctacaacacccgtattgaagaaatgcctatgaatgttgccgacctcatttaaattgttactaataaaaacagtgtgagtatcggatcgtgactactatcctatgatcgtgcgcgattttccgattcttaaattagtaatatcggtctgcttatgatgtgttgttgaccattctggtctgctctattccagtggctgctctcaaattatatgaagtgacttttcccctgggtttaggttctacacttgtacttcccttaagtgtagatacctagaaacataccagttattgactggatcttatttaataagtgttaaaagctatttttttcctttaatttctatccttactgtattttacgtagttaataagctattagattattgtgtgaatgattgccttgctttaaggcatttcctgctgttaattaaattaatctttattaattattaaatattaaattgatcattattttcatctgtaataatgaattttttttttttgttccctcgtatagtaagagtttttttcatgaagcagtggttttttgttgtattgtatcacagtttgttactattattgaattatagaatgtatcaaagtaaaacatttttctatattaagatacacatatttttatttttgtgtaaaaacacttatgttgttttccattgccttggtaaatgtatcataggtttttggaaaggatatttcaatcaaaaaacatctagacgaaaatgttttgtaaaatcttgcttgttcatactgagattttgtatcttagattaaataaaaaataacaattaaatttgtaattgttatgactaattaaaacctctgtttgtttatttttactataatatttcctgtctttaactattatcaagcaagtaattttttattttgtatttacaggaaaattaaatcaatcacacaacactgaggagacactttttggaaataaagacttaaatttccattctgaagctcaacaaacagtggttttacttaaaataaacctttcaacttcccctccagttatattattgaaatgtggatattttattttttagaattattcagttaaattaattttctacttggtttatatggagcgaataccgtgtacagacatttttatttataaataaatttttaatcttaaaaaaacatttgaataaattatgttaaggctgctcattgtgtgccaatactgattgagcctagtcataattaaaggtaactgatgaatctattttaaaaagggacacataagttttaatttatcgttgaaatatataattaataatgtaataa

SEQ ID NO: 349 - DNA, 1590 bp, Nezara viridula
gtggaggttacccattgcagtagcttgtgtttgttattagtgaatgtgtattgtacagttaatgtttgtattgtgatttaagatttcatctaaatattaatatcatgtctgactcacggagagttcaactgaaagaagacttgtcttttgtggagtttgaaacaagcgaaaatgttgaagttatatcttcttttcaaagcatgggacttaaagaagatttgctcagagggatatatgcttatggatttgaaaagccatctgctattcagcaaagagccatcattcccatagttcgtggtagagatgttattgcacaagctcaatctggtacaggaaaaactgcgacatttgccattgccattttacaatccttggatacccaaacaagggacacccaagttttatgtttgtctccaacaagagaacttgctgtacaaatacaaaaggttattcttgctttgggtgatctcatgaatgttcagtgccatgcttgtataggaggaacaagcttaggagaagatattagaaaacttgattatggtcaacatgttgtatctggtacacctggtcgtgttttcgatatgataaaacggcgaactctaaggacaaggtcaatcaaagtattagttcttgatgaagctgatgagatgttaaataaaggtttcaaagaacaaatttatgatgtatatcgtttcttacctccagctactcaggtagttcttatttctgcaacccttccccatgaaattcttgaaatgaccagcaaatttatgactgacccaatcagaattttagttaaacgtgatgaattgacattggagggaataaaacaattttttgttgctgttgaaagagaagaatggaagtttgacacactctgtgatttatatgatactttgactatcactcaagctgttattttctgcaatacaagaaggaaggtcgattggttaaccgaaaaaatgagggatgcaaatttcacagtttgttctatgcatggtgatatgcctcagaaagaaagagatgcgataatgaaggagtttagagctggaaaaagccgagtgcttataacaacagacgtatgggctagaggtattgatgtacaacaggtctcccttgtcattaactatgatttaccgaacaaccgagagttgtacattcataggattggtaggtcaggaagatttggaaggaaaggtgtagccatcaattttgtgaagagtgatgatattaggattttgcgagatattgaacagtattacagtacacaaattgatgaaatgcctatgaatgttgctgatctgatttagatctctttaccaaaagaaaagttgaccagtttttgtttggccttacattttttttttctttttgtaaattcaagaaatttttgtagttaattttttttttatgttaactactattgtataaaatttatttgtctacgaatgtttgaactttatctcaaaactgaattgtatatttatgatgggatattagactcatattatgtatataataatcaataatctttatgtctatctatagaacagatttttctttattttatctttttaacaaaataaatct

SEQ ID NO: 350 - DNA, 1188 bp, Nezara viridula
caggaatcagttctctggagaacctttaagcattgtggagtgggaagattgggtcgcggacccaaacttaggtgtctgttttctaaattatttattgtgaattaagtattagcttgtgctttctacattatggcggggaacaaacctgaagaggataaagaaactgaaaagtcagtagagagcaccagtaccgaagtgccagatttattaattaaacatccattgaataattcatggtccttatggtattttgaaaatgataaaaaaaagacatggctgcaaaatctgaaagaaataactagttttgatacagttgaagatttttggagtgtttacaatcacataaaagcagccagtgaattgaagccagggtgtgattattgcctttttaaaaaaggtattcgtccaatgtgggaagatgctgccaacaagcaaggtggtagatggttaataagtcttgaaaagaagcacagaactagtgagctagataattgttggcttgaaattttattattaatgattggagaagcttttgaagagcacaccgatgaagtgtgtggagcaactgtcaatattaggccaaaaatggacaaaataggtctttggaccgctaatgctgacaaatctaagcaagatatagtgttagccatcgggagaaaaatcaaagaaaggcttaagcttcctctcaaccaacctatccaatatcaatctcactctgattcagccattaaaaattctaccgttataaaaagtacttacagtatataaagttagttttaggaatatataataaatttcatcagcagaaatataaatcctctctgctcaaaatttttttgataaagtaaatagtttttgtgtctatttacattgaagaaaattgttttttaagtaaattgtctaaatcaagagtgtaatattatcttcaatatgtaaactatatttatacaaatttttatatattgttctttaatatttaataagaatattgttatgttttcgctaattgaagtttctatttgttatgtagtagaattgtgactaatttcatagtatttcttttgttttcctattgagcattgcattttttattactgtatatatatatatcaattcaataatgtttaattatatacccgaaaatcttttagatctagtgttcatggttttacttatttattcccctta

SEQ ID NO: 351 - DNA, 959 bp, Nezara viridula
agtagacagctagcgagctgtacagctgtcagttgtaaataaaggccgtattacatgtaaactagctttttaggagtattttagtgttgagtaacgattgtaattatttttgtacatagtataagaaacgtcaagtcctacaatgacaaataaatttgaagcccttaaaaatagtgatgacagtggtgaagatgagcatgggtctaaagacattaaaagtgctgatttgatatcttcagtgcctttagaaataccaccaggagaccataagcttcaatactgttactggttgtggtatagtcgccggtctcctggtaaacaatctcttcattctttcgaccagaatcttaaactgataggcacgtttggatctgtggaacagttctgggcaataaatagtcatttagctcgaccgtctgatcttcaaagtcatagtgattttcatctcttcaaagttggcattaaaccaatgtgggaggatgaagctaatcaaagaggaggaaaatggatagtaagactgaggaagggactggcctcccgatgttgggaaaatctcgtcttagccatgctcggagagcaatttatggttggacaggaaatatgtggtgctgtggtatctattagatttcaggaggacattatttgtgtgtggaacaagacagcttctgaccaagcgacaacaagccggatcagggacactatgaggagggttctcaacctccctccgaatacagtattagaatataaaacacacaacgacagtctcaagtatgaaaatatctctttgtatatacctttaaaaattaaactaacagaaagcgttatgaatgggagttagatttttttattgagtaaccttaaagaatttaaattaaattttttaaattttattattttatcatttactattttgaattattaaaaaaaaatcataataagaagcttgattttatgttttc

SEQ ID NO: 352 - DNA, 715 bp, Nezara viridula
ggccatgtcatcttctgagttggagcagaagacgaaggacttgacgttggagacaaagacggtgtttgatgataaagaagacttcaatgccaagcatccgctcaataataagtggactttgtggtacacgaaaccacaaactaacgataatgagaactggcatgacttgttaaagcccgtaatttccttttcgtccgtagaggaattctggggcatttacaacgcaatcccgccaccaaaccagttgccgttgaaatcggactatcacttgttcaaagagggaattcgtcctgagtgggaagattcgcagaatgccaatggtggcaagtggcagtattcctttggtaaacgtgacgcgactcctgtcatcaatgatttgtggtgccgtggtcttttggctgtcattggtgaaacaattgaagatgatgagaatgaagtaaatgggatcgttctcaatgtcagaaaactggcattcagagtgggtgtttggacccgtgattgtgatgagtcaagattgataacagttggtgagcgactcaaaaagattttgcaattgcaggaccgtcaaaaggtggaattcatgtctcacaacgcatcaaatcaaaggggtgccgagccgcagatcgtgctttaactgtgaatgctctttaaagtggttgtattttgctatgatcatgatatattttcaattaaatagccaataaatgatatcgtg

SEQ ID NO: 353 - DNA, 764 bp, Nezara viridula
tatgttccttaacacactcatcgtaaacaacacggatctcaaatatttgaaactgtttctttgtgctctttacgagaagatctacgacgatgatcccttctcagagttctttgacggtcttaagcagtctgagaaaaactattacgtagacattctcaatttaatttaaagctttcgtgttaaacatttcttttttttataccccatgaacgacaagtacgttgtaacttacaaagaaatagacaatccctccactgagataagtaaagagacttacgacaaagactttaagaagatatgcacattggaatccacgggaaacattttgtatcttcttaagcatctaaaagattttaatacaatgaatcacaatttctacataaatgtttttaagcaggggatctctcctgtctgggaggatccaaataacaaaaacggatgtaactggagcttagtcttaaagaaggaggtgtctcagaggtattttgagaagcttatggtctgtttttgcacagggttcttcaaaagttttgaaccaactggtgtcgtagggactaacaaggacaaccgatttaaactgtcgatctggagcaaaaacgttccactcccaacggaatatgcgagtgtaatagcggagatcaagtcggctcttgacatccagtacaacatctcttttcagtttaaaagccattcaagactccttgatcacaaagtagaagatgcatagtggagtaagtaaattgttaagcgtgtacacatgtctg

SEQ ID NO: 354 - DNA, 1115 bp, Nezara viridula
gaaaagtacgcctcctgctaatgtcgataatctgtatgtagacttcaatgctctaatccacaactgttacaatcccaaccttggttctatcagcgaggttcattctgatatggtcgacagactagtcgcttcaatagacaatattgtggcgagaacaaggcctaaaaatattttatacatagctgtagatggtgttgcccctgctgctaagctggcgcatcaacgaggtcgaagatttaaggcggcttcagaaaaaaagatcatcattgagtgcaaggaggaagttgaagcaaaatcaaagaacgatgggagttgggaagaaattattttggacaacggggaggaattattggataaatttgaaccagaagaagaggtatctatcgaagatcttgatttgttgaaagagccaaaggcctcctttgattctaattctatatctcctggcacagagcttatggattatttacacgaagaactggtaaaaattttccaatacaaattgagcactgacgaaagatacaataatttaaaaataatttactctagttatttagtgcctggagaaggagaacaaaagattatgaagttcatccgtaaataccatgctacaaaccccgaggctgtacatgtcatgtactctcctgatggagatgttatctttttaggagttggtatgctgaatgttaagttttacataatgagagaagacacttataacaacaaaaacaaaaaaagcgtgtgtgaattttgttctaaaactggacatacttcgtttgaatgtgggaaaccatttttaaacaagtttgtctatgtcgatattctgcattttatttatattctaactaaagaatttaaccattttataaaaggccaatatgatcgaaatagaatgctttatgactggatattaagttgtttcttgattggaaatgattttatccctggactcccctgtttggatattaaaattgcatctatagaatcacttaccagtcttgtctgcagaaactttcttgttacacgcgagtatttgacaaatcctgatggtaatttgaattataacgcacttgaagctttcatgatctctttagctaggcaagaagatggttatt

SEQ ID NO: 355 - DNA, 303 bp, Nezara viridula
cgccgctggacctgagggaacagcgccctgccgaagaagaggaagtcgagggcaaaaagccgagccttgtcaagccgccttattcctacatcgccctcatcaccatggccatcctccagtccccgcacaagaagttgacacttagcgggatctgcgaattcatcatgacacggttcccgtactatcgggaaaagttcccggcctggcagaactcgatcaggcacaacctctccctcaacgactgctttgtgaaggcaggaaggagtgccaacgggaagggacattattgggcaattcaccccg

SEQ ID NO: 356 - DNA, 450 bp, Nezara viridula
cgaccgtggaccagtacaggctacagctgtatcagtacgcggtggtggcccagaggctgtacccaggtccgtacccatcgccgtacccaccgggccgactccccctgggtctgagaccggaggaacccaagccgcagcacagctacatcggcctaatcgccatggcgatcctcagctcgccagagtacaagctagtcttgtccgacatctaccagtacatattggatcactacccttatttcaggacgagaggtccaggctggagaaattctataagacacaacctctccctcaacgactgctttgtgaaggcaggaaggagtgccaacgggaagggacattattgggcaattcaccccgccaacgtggaagacttcaagaagggtgacttcaggcggaggaaagctcaaaggaaggtgaggcggcacatgggactggcggtggacgacg

SEQ ID NO: 357 - DNA, 2120 bp, Nezara viridula
agcgctgtctgagactcgttcggccattttcatatgtttctatagcgtggttgttggctacataggtgcagaagcattccggcattcaagaatacaaaattctcagtgtattagtttatgtagtatatcataggttatatttcattttagatatacatccagtgtttgtacaattgttttggtttattttgataatgtctgaatataattctgttgcacctcctcaacaatttaataaaagccaagcgtttgcagctgcattacaaagggctaaacagattgctgctaaaattaaccctggtgctagttccggaggggatgttggtacaaaacgaccgttggatgaagggtcagaacctgatgccaagaaagttgctgcctctcctccttctggacctccaaggcaatcaccccagacaatggttccaggtctatctgggggagtttacacagtagatatcaaagtccctgacaagatggttggactcaggcgtggaggggagcagataacacgtcttcagagtgaatctggttgtaagatccagatggccccagattcaggaggtacacctgatagaatttgcacactcactggaaattctcaagctataagccgtgccaaggaattagttaatgcgattgttcatcagcgttataaaactgagggtccgggaagtgatcctccacgcaatgacatgatgcctgggactccacaacctcaaagttcacataatccatcatttgtggaaataatgttaccgggacctaaagttggtcttgtaataggcaaaggtggtgagacaattaagcagttgcaagaaaaatcaggagctaaaatggtggttattcaagaaggtccgaatcaagaagcagaaaaaccccttagaataacaggcgacccacaaaaagttgaacatgctaaagcattagtttatgaacttcttgcggaaaaagaaaaccagtttcaggcaagaggtgccatgaacagaggtgggggagctggaagaggcggtttcagtggtgggcgtggtccatttggtcaacagaggggtggtgaagaagcccaatatattgtaccttccaacaagtgtggtgtaattattggaagaggcggggagactattaaacagatcaatcaagctacaggagctcactgtgagctggatcgccgacctaacaataatcctaatgagaaaattttcttaatacgaggagcacctgaacaaatcgaagcagccaaacagatgatttctgaaaagttaggacagggccctcctggtcctgggggatttcaacctcaacagcagtggggaggacccccacaacaaccttatcagccaccttacaatcaacaaccagtagatccaaattttacaggtggtgctatacccaacatgactgctgctcctcaagctgactacagccaacaatggatagaatattataggagccttggcttgcataacgaagcagatgccatagagcagcaaatcaaagcaaagcaggctgctcaggcagctgctgctgcacaacagtcacagcctactcctcaacctcagcaaaatggagcagcacctgactacagtgctcaatgggctcagtattataggagcttaggaaaaattaaggaggctgaatcaatagaacaccagatgaaggcaaaacaacaggcacagcaagggggaaccccatcaaccggagctccacagcccacacctcaagcagcagcaccagcagcagggcagacaccccaatttcctaattattacccaggaggaggtttctatcctggctaccaatatccagcaggtccttatccaggctatactcctacaccacagggtccagcacccggagaagctcaacctcagcctacagcacagcagtgaagcattctttcttatggttaggaaaaaaggcattcaacaggctgcaattttatatataattaaaagcctaaacaaaaataaaccaagtaaggaagggactggagaatgtgaacatgaattatgaaattatgcaaagttttatttttcgatatttttttttatttaaaaatgtttttctttttctttttagatatactgtgtcatgctgaaatttcttaacatatgtgctat

SEQ ID NO: 358 - DNA, 4265 bp, Nezara viridula
ttttaaactagttctgtgtcctagaaggtgtgtataattcgactagtgatctagcggaaggtttcatcgggtgctaactcttgtttatactgttattttccgttagatatcttttcgttgttgattcctgttgcgtggtgggatgctttagccgtccgcaattcttcaatgttaacacgcttgtcatagtaattttatattgacatagtatgaaataaataaaattgtattattcagttgtcgttaaatataacatattagctgaattatgacatgaatttagttttatgtggtttgtttccttttgcagtataatttggtgacattatgactattatggacatagctgtagtaaaaactaatcagaccattaatttttctgacatcggtgaagatgaaactgcaagagtcttttcagaaaatgtaacaatagtctctcgttctggtggtcatgttaatgggagttctaaagtaaaacttagtaatgttgttgactattcatgggaagaaaaattctacccaggacagcttttagcggttcatatgtcaggaaactatgttgcttacagcattaaaggtgctaactatgctgttagagtggtgaatagagaaactgcaaaacgtgcattaattaaaggaactggcgccatggtcgaagatttagcttttgcttttattcctagtcaaaccacattagcttgtgtagatgaaactggtgcagtttatgttcataatatttttgaagactcaagagatatttctactacactaattttacatattttacagatcgaagctgtgtctgtcccacggcgagttttttggtgcccatatataccagatgagcaggatcttctagaacaagatccttatactgatgaaacttcattattactagctgtcactagagacaacaagattgaagtatggcatgttggtaatgcatcgagctatgccaatggcccagtaaaggctgatacatccgttggagcatgtgtccagatatgtgctcatgagtctaccattgtggatgctgcattttctcccgatggaacagcaatagctactgcatcagtcgatggagagtgtaaattttttcaggtttatatgcaaagtgagggagagccaacctgtttacataggtggaaaccacatggtggcaaaccagttactactctgttttttttagatgatcataaatctggaaatcctgaagtcaaattctggaaatatgctgtcacagggaccgatgataacaatgaattaaaactttggacgtgtgagacttggaagtgccttcaaactattaattttaaatttggtagttcaaaccgacgactaaaactaaaagcttgtgtcgacctttctgcaggtttcatttttgtctcagatatgtttcatcgggttctttatgtccttgaacttgagaaaaatgacaatgaaacaatcccatttgtaagaactgtaacagaatttatgttgccatgtcctgttctaagttttgcaatagttgatgctggacttcaaaacttgaaacaaggttcttcttttggtgttgttgacgaactttgtaatggagaggatgatgaaaaccattcagcagtttttatggctcgtctatatcttgttcaacctaaatcactgcaagaatgccatattgtttatcaagctaagcctttcgtgcaaggaaatacaacttgtttagattctaatggcctgagtggtgagatagatgaaatccctaatgtaaatattgaaacaccttcaactcagcagatatcattgaatctcatgactcctgatgcttttcattctcctcattcttctgaatctactactttaatgccaaacaatgatgtggccgtggctcctttgattgaagggactatttcctattctggatctgttggcgttacgacttgtgaaccatctaatgaaagtgaaggaggagaaagaagaggttttgtaagtggaggaagttcaccaagtagagaagtggaagaaatactgtcctctccaagattttattctgaagaacctaaaccgagtcagaaaacatctctatcagagcccaaaaatgtagaaatgaaagaaaaccttagagggcttgaattatcaattcaagaattaaagtcggaggtcaaaagtttgtctcatgccgttggcttacagtctactggtttgcagcatttacaggaagaaattaaaaggagtagagggtctttctcttcagacattgaaggagttctttcaaaagcagtttctacatttagaccagtttctgaggaagatatagctagggccattacacctctaatatctcaggctattttaggcattgttaatccagctgtggttaaatctatgactgagcttcataacatggttcaccaagaggtatctcagaaattatttatgactgagcagaatttgaaagatagcttgaacaaggttatgaaaagcaaggcatttaatgaagtaatggctaacagcttaagttcagcagcagcatctgctttggaaactgtatttaaagaaacatttatacagacagcagttcctttgtttgaagcagcctgctcaaatatgtttcttcaaattagtgacacatttacaaaaggtgttaatgatgcaatgacggatgtccagaaatttactaataaattaaatgagcgtgctaatcttgaagttgttgcacttcaagcagctacagaaagaataaaccaaacagcacaacattttacttcaactgttgaaaaagaagccaaagggcttgaagatgtggtgatagaaatggaaagaagattaaaagcttgtatgaatggtgcttcggtaaggtcaggaactgccactcctgcccaacatcttgttgatccccatataattcagtctcaaatagctatgctcattaagcaaggccagtacaatacagcttttcaacaggctctctctgcttcggaccttaatcttgttacttatgtgtgtgaaaaagtggacactggtaaagttttcaccagatgtggctgtgttcttcaacagcatgttctgttatcccttattcaacagttagctgctgatatgacctctcatagcgatgttaagcaaaagtatctagaagaagctgtcatgaatctttccccaggtaatgagaatactcgggaacacatgcctcaggttttaaccggtctgcagaagcaattacaactatttcagactactactaatgaccctcgattggccagtaaggcaaggatgttggttatggtttgtcagcaaatcgtccggaatcttaaagatgaatgggattgaaagaatgtgatctattttatttattcttctttttttaaccacacaacaattgtaaattatatgagattaatgatgacagtgcattgtaaaaaaatattacacttttagacaaaaataaatatatttgttatataattttcataaatcaggtgtttttttgttgatttgacctttactattattatttgtaggtttaggtttttttttcttgcaagataatggatttggcccgcctttcttctttctagaccttttaataatctgggatgttggatttggttcaagtatttttcttttcatcagttttataaccttcttttcagcagcacttacatcacaactctgatataaatgttgatttgcttttttcacacttaattcattaggtggtctgagtgttggtgctttgttgaagatatacaacaatggaattcctggaagactggttacaaatctttgtaaatctctgtcttgtgaagctaatatgtacctgaaatcgctattcttttcaatcattttcttaatgcaggttgcagcaaataaaggagttttatgaccacagtggtgaactggaaattgttttaaaattaatgtagcaccataaagggcagaacccagtttttccatttccaaaataacacaaggtgtagtcaacagtctaacatctccaagatatttttgcagttgttcagcaatgtttattttgttctgtaatgctgtgttacaaaatgttccatcaaccaacacctggtaaggtttgctgaatccaaagttattagaataaaactttagaattctactaactttcttttgacgattaattctcatttttaaaaacttgcattgaaagcgaggttaaaacttcaacaatatcacgaattcataatagactaagtataattcctttaaacagacgctgttcaaaacaaatctagaatcgttcagtgaagaagttc

SEQ ID NO: 359 - DNA, 2788 bp, Nezara viridula
cttgcattcaatggctgcttagagatttttaatcaggattgaatgtcaaatattttctcctgttgtggtatcccaaagcattcatgaataaattgatttgatatttaaatgatttggggattttttactttaatgagactgaaaaaatgacatattgtttttgaaactaaaaggattatttagaacaataacaatattcatttttcaaataaattgtactatatgcctgcatctgatatggatttgtacaatgcaatgtttcctccccatttaattcatataccacctcaaccagctcataatgaaggcagaacatataccactcatccaactgcatttgaagtttttcgagtggtttctagaaataatgaaatgcgctatgatcataggaaaaattttatcttgcattcaaatagttcagtaaatttatcacacaatcctaataaaaggatgtcttctcagtattatgctaaaacattttataatacttctaagcaagaatactggaaaactaaaaataatggtgagaacaaaagattggaacatggaagttctgctccctgtttaatttcagcagtcagtaatgaatcacttgatagtggaatttctagatctcctactcctactcccccgaataaacaacaatctgttaattcaaatatttcatatgatcagatgaagccttaccaggttctgccatcattagaaaagaatagtcaggaaaggcaaaaaggtatccataaagcggctaaggtttactctaaaattaattctcaagtgaagttcactgaagcggataacaaccgtcccctaaatatggtcccaaatggccatagcataatgttttcaaacaacagacatccacttcagaggagggaagtgcagtcacaggccaagaggagaactacctacaatcgcaatataggacccttttataagaatcgaagaacatataactatatagttcattacccttctccatacccacaaagttctctctacactccttattatactgcaccagaccgatttttgcaaaggtctcacttgatgcctgttacacaaccaccggaaggacttctgaatggttctacatgggatcaattaagtcagaatatttggaaaaagttttttttgaaccagcaaagtgaagaattgtataaaaagaaaatggcactatggaaatttttatatgtgcaaataaagacttgtttcccaaaatatggactctatttagttggttcgacgatgaatggttttggaagtcaatttagtgatgtagatatgtgtctcattatccgttactcagaagtggatcaaagaaatgaggctgtatcatacttgtcaagtatattgaaattattagaacgatgtgatttatttgaaaaactagaattgatacaagctaaagttcccttgctcaaattcagagattccaaacaaaatattcaagttgatttaaattgtaataactctgtgggtatacgtaacactcatttattgtattgttatggtcaaatggactggcgagtcaagcctttggttttagttgtgaaattgtgggctcaatggcacaatattaatgatgccaaaaacatgactatatcaagctattcactttcattaatggttatccattttttacaatgtggtgtaacccctaaagtcttgccttgtcttcacgaactttatgctgataagttcaatcctgaaatcgatattggaaatattgacattcatgaagatattgaaccttttatttctgaaaataagcaaactcttggagaactgcttctgctgttttatcagtactatgcaacatttgacttcttgaagtatgctatatctgtaagattagcatcagttattcctgtagaagaatgcagacacgtaagaacagtgaagaatgatcctcatcaatggaagtttttatgtattgaagagccattcgacctgacaaacactgcaagatctgtatatgacccagataagtttgaactaataaggaatgttataattagaagcggtaatgcattaatgaaaacaaaaaaattggattcaatattttatttggaagcttcgtagagctgtaagactgaaaggaacaagggatttggaaggtccagttggtgttcaatcgatatgattgacttaaaggttataacgatctctagaaccaactatggtaattttctaagtatgttatttctggatctatatcctgatcctactaataacatataatttaaaatttgtaatacgagtttgtttaatgagttatttattcatgaagtgctacaaggatttcctacaagggaaaaaaataataaaaatatgaagaaacggcaacaaaaaaaaagaacaaaaataaaaataaatacaaaaatttaaaatacaaaatgagaaaaaaaaaattaaaaataaaaatacttaaaaaaaaaaagaaacaacgaataaaggtgtaggatttaatttctagagaaatataacttaatttttcaatatgagtgcaattgtctagcctccaacaagttaaatatttgataacacaatatttacaagattgaatatttaccaactgaagaactgaaagaggaatgtgcaatgatgggtatgcatcaaggcaaacaaaaaaatataattgtatgtattaaacaaaaggaaaaggatatttaaccaagcctccttctgcaataaaagtacttaaaaatttgttttcatttattcaaaacagaaattttggaggcttacaatttataattatactttttttttatatagtattaag

SEQ ID NO: 360 - DNA, 1149 bp, Nezara viridula
gcaacattgctgaggaatacaagatatggaagaagaacgtccctcaactgtatgacctgatgttctcacacgctctaaagtggccatccctgtctgtgcaggtctttccagagactaagagagatgaagttaaaggaaagactacccaaagactgctattaggaacccatacaagtgggtcagaacaagaatatattcatatagcacacgttgacttcccagacaagttcgaagaagctcttaatgacgactttagagcagatcttcgatttaaaatcggtatgtccataccagttagtgacgaaccaaatgtgatcagatacaatccacttgcttgcaatataattgcggctagattcgattctcgagagacacacatcttcgactacactaagcatcctatgcttggtgatagacccaatccagacatgattcttattggacatgagaacggggggtttggtttgtcttggaatcctttggtgtacgacgagattgccacagctggatcagacaagtatatttgtatctatgacattaacagtagtgataagaaagtcaaccccaagcttattcttaatgaacatagtagtgttattaacgacatttgctactctttccattcccaaaatattctagccagtgcatcggatgatctaagcatcataatttgggatacaaaaatggtcagtccttcaacgttgtttgctaaagcccacactgcagacgttctttctgtccatttctccccgatcagttccaacgtgcttgcttcctcctcattggacaacagtgtcaaagtctgggacttaagaacacccgataagccaatgtatacgcttaatggtcattcagatgctgtgggtcgggtgcagtggtctcctcacatagaaagtgttttagcttcagccggtaaagacaggagagtgtgcttgtgggatctaaaccttggagaaaaaatgttagtagaggaagatgatacagcagttaatgttcccgtagaacttatgttcctacacgggggacacactgacaatgtattcgatatttattggaatccctccgagttgcttgaaatagtcagtgtatcggaggataacattcttcagatttggcaagtccctgaaactaattcactttaaataaatc

SEQ ID NO: 361 - DNA, 2335 bp, Nezara viridula
agaccgagcgcctgggcctccgcttcgcccctttcctttctgttttttctcatcacattttcatagagtcacatctttcatcctcaaatttttctataatagaccgatattaaaaattgaaggtctcggcagccccgtaccccctcaacccgcgataaccgaccaccaggatgcgaaaagcgaaggcccagacataacctttacgggtgacgcccttattttcccatcacgcgaacaaaaactagtttcggacacgtagaattttaattatttatttattttttatcatatttttaaacccccccacacacatattgagtttttcaccgaaccatttatgtcaatctacacccatttcctcatgtcccaacggaatttcaacggtcctcggccaggaaagaagaactttttcagtggaggtggcacccgattggtcgtttcagggcttccacctcacctgaggccagaagacttcgaaccacttttgtcacaatacggccaagtacattcatgcgagaaggttaactctcgagatccccaaacagcaacaatcattgtcacatatgatactcccgatcaggcacaacatgccataagcgaactcaacaatacagaatatgaaggatcattcttaaaagtggagctccaaggtaaccaggaaaggagaggtcccggtggcggtcgtgcgggcggccggggacctagagggttcgcgatgggaggcggcgccaggcagacggacttccctctcaggatcttggtgcagtctgacatggtcggagcgatcattggtagacagggttcgaccatccgccagatcactcagcagtcaagagcgagggtggatgtccatcgcaaggataatgttggctcgttagagaaggctatcacaatttatggaaacccagaaaattgtacgaatgcttgcaagaggatccttgaagtgatgaaacaagaagcaacgacaaacaataagggtgaaattactttaaaagttttggcccataataacttgattggtcgtatcattggcaaggctggaaacaccattaagaggatcatgcaagagactgatacaaagatcacagtttcaagcataaatgacattaacagctttaatttggaacggatcatcactgttaaaggatctattgaaaatatgtcgaaagcagaatctatgatctcagctaaattgaggcaaagttatgaaaatgatcttcaagcaatggcacctcagagtatgatgttccctggactacacccgatggctatgatggcaacttctgcaatgggttatggtgggcgaggtggaggctaccaaggcggcctctattccggagcctaccctcctgtctaccagccaattccacccgcctcccatgctcccgatgcgcagataaaaaaatcgtcatatagtaaggttggcgaagaaaacaaagacattacaatccaagaaaccacatacctgtacatcccaaataacgcagtcggagccatcataggaacgaaaggctcgcacataagaaatatgatccgattttccggagcctcggtgaagatcgcccccctcgagggtgagaaggccagtgatgctgcacaaccggccgagaggaaggttaccatcgtgggatcacccgagtctcaatggaaggcgcaatatctcatctttgagaaaatgcgcgaggaagggtttgtatctggatctgatgatgttcggttgactgtcgaaatactcgttccatcatcacaagttggacgaatcatcggcaaaggtggccagaatgtgagggagctacaaagagtgacaggcagcgtgattaaactgccagaacaaggttcctcgggagcgcaagaagaggagaccactgttcacattataggagccttcttctcagtccaatctgcccagaggagaatccgcgcaatggtcggtaccggcgcgggaggcccacggccgccagccggggagcgtccaagagaggagccaagccaaagacatgtagggggcctccatcaacctcgagaaaaattatctacctccttacctttagggtcttaaaaaaattatatatttaaaaaaaaaagaaaacgattttaataataattattaatgataatgattgctatatatattatattatatacgaatatttaagggatataaaaaaaattaattaaaaaaaagtgtagttctcgaaagagattcgaatagggcaaagtgagcgtggggggaagtgtttagccaacgcctgccctatcggtaaatcaaatttatttttgatacattgttatcttcgagcgtcgattgtgactcctatcggtttcttttgttttt

SEQ ID NO: 362 - DNA, 6354 bp, Nezara viridula
tgcagttctagttcggttgactctgttagaaatctgatcagttttttttttaatttactttccttttgacgttttcctttaattcttttttattttttattttaattttgtgaataaatcagttatttgtgtgtaagcgggaatttttagttactagcgcggtggtttgggtaagtgcctatggacggtcataacaagcttcgaaagagttaagtcgttgatcactggaacaaagatgctgtgattgatttttaacatttaaaacatggaagaagctgtattaggtgggacggattttaatatccacaaattaatgattaacaatcaagataaaacagaatggaaaaaatcatctccattaaagacctatagtaaaaagactactccaaccaatgacggaaagagtaggtatggtagatctcacaaacctagattatctggagactttttgtccaccgacaagaaagtaagtcagtatttaagaatagatgttgacaatcagatgcactattttaaagcctcaccgtatgctgttcaaaaaaccccaattaagagtcctcctgtgggtactcctgggaaaagaggtcggaaacctaaggctgtaacattattaaaacaagaaaacagattaagccacaacttaggtgattttaatgtcaaaactagtcatccagttagtaatataaatgacatagaagctccagttccaacttctactgaaacattacctctacctgaccaactgataatccctaaagatgaacagtattcagactcagaagaatttatcaatgacggtgattggaatgtaggagatttggcttgggcctgcgtaggtggttttccatactggccatgtgcaatcacaaaagaccctgttgaactttgcttcaagaaagtaaaaattttaggtaaaaatcggcagcctaaggaatgcatacatgtaagattttttggagataaaggaagaagaagttggataatggcatcacacatcctaccgtttcatggtcttgattcttttttatctttggctgaagaaacttgtactgcagttgttaaaaagaaggatccgagactctaccgttcttttactgtgttaccatctgtaagaaaagcgtggcaagcagcagtcagtgaagcagaaagtttgatggaatcccctaggcatgagcgggtaatgtacttcatgaacctttatccctctcctcctccggaggcacaactgcctagtgggggagaaaatctcgtcaaaccggaaccaaaaaaaagaggccgcaaaagaaaatctgaacttccagttacgcctattgcagagaagaaaattaaatatgaatctatagatgaggccttagaatcagtttcagcaaccacacaagctgtacctccttccagtgatattccagctgccgaggtggctattaagaaggagccagttactcctatcaaagaaatgcccaaatctgaaactgcattttcaccctctacgactcctcagtcgcagctcacagcaaaagtggaaactggatcagtatcagccgttaaaccagtaaattcacgggagtcaatgaaaaatgttgagggagagtctattgctaaaatcaaaagtgaaccaaaaagtggcccaccgacgggtaagaagcgaggaagaccccctggaagaaggaaaaagagtagtgaagatgattttgattttacacctttgaaaaggaagtatgttaagaaatgttcaaatgatttaaggctgagggaaaacagaactaagaaaaagacattcaactttgatatgaaaaaaatgaaaaaacttcgagatccagcttttgaagttttctatgagaaaaattttgatcgtgtttctgatgaaaatcctgaactttcagaagaagatattgataaatttattgaaaagatgtggaaagaagttaaagaaaagcaatcaacatttaaagctaggtcgagggacggtgcagaacgtggttgcagtgacagtggcgcagactctaagtctgaaacaagttctcgcagtgattcggacggtgcagaacgtggttgcagtgacagtggcgcagactctaagtctgaaacaagttctcgcagtgattcccctcctcccctcattttaccgtctgtcaaaactgtcttcaaacgaggtatttcattgttcagtggcataaagggtgaaaaagtctgccaggtatgcttcaaaggcggtgatgttttgaaatgccgtggaccttgtggccagcagtttcatataggatgtgttgctaaactgagtggtgaccaaccgcatattaaagaagaagatataaaaaaagaagaaataattttaaagaagaagagaggtcggccccgcaagtctcttccaccaccaattaacaactcaattgattcttcagacgtgaaaccggtagaaaataataacgaagacaccaaacctgttattagtcatgacactgatgtcaaacctattcttggaggtgacagtgtcaaaccggtaatggagaatggtgaagtagaagacattaaacctgttattgataataattctgtgagcactgtggaaagtgttgctaattcatgtattgctgagttagaagagcagttacagaaaaatgttccatgtgataagttaactggtgataatgacagttgtgataaaacagacatagatgaaggcaataccaaaatgaatgacgaaaattctgttaagaagcctgatatcaattcagaattaacagatatagaaaatattgatttagaaccaactttaaatgacaaaggtaatactgatttgtctgataattcagttaacgaacctgatcaagaatctcttgaccttaatttggggttagatttaaatgatgaagaatccatcaacaataaagagaaaggaggacaagacgttagttgtagcaacagtaatgatagcaaagtcgacattgcggaaactaatgaatctattgaagaagaattgcgcaattctgaattcaatgcaaaagtagacgattctttagataataagtcatctttagaaagtaacgatgaagtgaccataaattcagtgtcttcgtgtgacagttcgtctaaagattcttctgatgttccaaaagcagaagccattgaaatcgcaagaaaagacaatttaaagttgttaggaactcttcgaggggattcatttgaatctgagtcttccaataataacatgttagttgttgatgattcttcagcagatgataggttgatgatagaagagtcgccagctaatgaggctcaagattcttcatctgatgccaataacgaaaccataattaaagataacattccatcagtgaactgtggagaaattaaagaacatattgaaaaaccatccacaccaatattagacatgccaataattgactttgctgatattactgacaacgaccagaatgagccaattttaattaatgcagacaataaaggtacatctgtgccaatggatagtgacaattcactatactccacacagacccctagtgacataggtttgcttaaaaatgctacggaagtaacaacagaaacacctgctgtttctagtccaatggagagttctgacagcatgatggaacaagatgaaaaggaaattattagccaagaagaaaaaaattcttctcaaaaagaaaggagttcttctcaagaggaaaagagttctcaagaagaaaaaaattcttctcaagaggaaaagaattctcaagaagaaaagagttcttctcaagaggaaaagagttcatctcaagaagaaaagagttcttctcaagaagaaaaagagagttcttcaggtgaagaaatttcaaacaaggtatcaaaaccatcaaaaaaagaagacaaagacaatgtgaagagatattcgaaagcaggcaaatcgaaggggccaggaaaagaatctaaagatgatagtgaaaactcagccaagagtagcgacacagattctgataaaaccaaaaacaagggttggatgtgtaatacatgtaccgaaggtaaagttggcccttgcttcatttgtgctaaggatgagggtgatagattgagatgtggttattgtggcaaagtatatcatctgaaatgtgccaaagagtggccgcagtcccagatttcagagactgcgaagggtcgtctcattttccactgtccacagcatgtatgccacacttgcatatcagacaatccctcgagtgtctgtgccaggttcactaatgacaggcttgtgcgctgtgtcaagtgtccttctacatatcattatggtaattactgtatccctgctggctctgaaatattgagcatatctcaactaatttgtcccaagcactatgtgccccacaggaaaggacttcatcatgtcaatgcatcgtggtgttttatttgtgctatcgcgcaaccaattgcaggaggatcgctgatttgctgcgacctatgccccaacagctttcatgcagaatgtctcaagatcagccctcccgaaggcgcgttcatttgtgaggactgtgaaactgggcgatatcctctatttggagaaatcgtttgggtcaagttaggaacttacagatggtggccagccaagattctttatccccaagaagttccagaaaatattaaccagttggctcataccagtggtgaatttgctgtagaatttttcggcactcatgactattattgggtcaatcgggggagagtattcctttatcatgaaggcgacgggtgcaaaatagtcagtaaatcaagagtggatgagctgtttacgcgtggtgtacaagaggcttccgaagccttccttaaatggacagaagagagagccaacagagaagccacttcaaggccttccatgaaacctcccaagtatgtgaagatccagtcgaatagattctatggaaatgttaacaaagtgcaagattcaaaggagaatgttgctactacttgcgattgtgacccgtccaagcctaatccttgtgggcccgagtcagattgcatcaataggttgctgatggttgaatgcaacccccaggtctgccctgctggtgagaactgctgtaaccaaaactttgagaagaaaaactaccccaaccttgtcccctacaagacagaaactcgaggttggggccttaaaacattagatcctatacctaagggtggcttcatcattgaatatgttggtgaaatgattgatgaagaagagtaccgtaaaagactggcaaccatgcaacagaacaaagatgagaacttttatttcctcaccattgacaaagatcgcatgttagatgccggaccaaagggaaatgttgcaaggtttatgaaccactcctgtgatccaaactgtgaaacccaaaagtggactgttaacggggatactcgggtcggtctgtttgcactggaggatgtaaaagcaggaactgaattagttttcaactataacttggaaactattggtaatacaaaggtagaatgcaaatgcggtgcttcgaactgtgctggctatataggtgccaagaatctttcaaaacccaacaataacaaaccaaagaatcgagatgggggaacagaagataagaaaagtgttgtgaagaagaaaaaaaggaaatccaataaagccaacaaacacactgaggacacctgcttcacctgtggtaacggaggtgagcttctgctctgcgacgacgccacttgtcctaaggcataccatctctcctgccttgggctcaccaagcaccctgccggtggttgggtctgtccttggcatcagtgtagtgtttgtagcgctacaaaagttcaacgctgtacactatgtataaactcttattgcagcgagcatgcggagggtaacatctcccttaacaggaaccatggccttctctgcttttcacataatctgtccgacagcggatctgattggagtggagctagtgatgacgaagattcgaataaggtcaaatctgccaccaggaaatatgctcggtcgaaaatagtcaatggccatgctgattagcggttatttagagactgttatttttattattaggcttaatttgttttaaatattatggaaaagaaccggttcttttcctcaaatgaatttttttatatgtgcctctatgaaagcaagttaaatattttatgtaataagttgaacattatattttaaaaaaattagggacttacagtatacttatttttaatgatctggaaatgatcataaacatttttgttaaagagaaaatgttcatatttgtaaagcagtttagtaatggaaagatcggaataatatgctttgttgttaccaaataaaattgatccctgcatttttagtgattatttaaa

SEQ ID NO: 363 - DNA, 3476 bp, Nezara viridula
tttttgtagtaaaataaatgtattcttacatacattttgattacaaggaaaatgtaaagattaaaatatatatattaaatatatacataacatatttacaataattaaacttactactaggaaattactggattacaaaatgaataagacatcttaaaaatcatctttcatttattataagtagggttttaataagtcacatatgaaatgttactttaaatacgattacaacaaatctgcatttttcaaatacaaaacttcaacaacttgcaaatgctctggagtacagtagtaaagcgtaatggcaaatctatgtaaaataaacatatacttcaaggtgtaatagtaaaaaagaaaaagaaaaagttgccccttacaaaaacaaatatataacttgcttaattttgacaaatcattcagtcattcttatcgcagtcacgactaatgtgtcctgtcttcccacaactgtaacaggacctagatccatcaggacatgctcgggccatgtgcccagttttgttacaattataacaagctgaggtgaacccacctctagaaccatctctttgttcgggacattccctagctatgtgcccagttttgttgcagttgtaacaagaaggctcatcagcactttgttgacagtccttagcaatgtgtcccactccattgcatctgtaacatctgtcttgatcttctttacaatcccttgcaaagtgaccataacgattacatttataacatttgtctcgaccacgacctccaaatccacctccacctcctcctccaccaccatttgggcattctctagcgaaatgcccagtccggttacatctataacaggtattggagctcatactagtaacgctccaggtttaatgttcacgccgatgttggtaaaccagaatgtaagcagaagactgtcccaacacacgtgcagcttatgcgttgtaaggggtgaaggatgctgcggtggcctgttttctcaaatgcgccatttctccctgccctttcaattttttacacaaattgatttcaaattttagattttatacagtatatttctgagccaaaatacaaaaaaataattaataagttttaataggtaaataaataaataaaaatggcaaaattgaattaaaacgataagtttaaatacttaatagattatggtagctgtggtgaaaccttctgttccaccactttttaaaatgagtattttcttgaaaatcaaacctgattttgtttattgttttcgtagaaacattgttaaacatattgccaatattacttttgataatgttatttacagctccaataatttttcaaaaaatggttacagtacaaatatttctggcaaggaaacaattcctgacaataaaacaacacaatttattaaatttgatgacatgatagaggaaggaagaaaagttgctcaaagaagttatgttgttcaggtcaattctgaaaactcttgcattgaacttcatgactattgtcaaagtatttgtactgttgaaaatatgttctattaccgagtgaaagatgatcactttgttctcgttgagttcagtaactcggaagctgcccataagttatcttttgatccaaacaatctagctgtggtatcaccttttatttggtttagaactgggaaaaagaaaaaacttgttccatcctcagtaaatgtctcaccactcataaatatttctcaaggaccaacagaaccagagatcatagaatggatgactgtagctcaatcgttgttagatgaaatggagattctttatcagtcaacaaaattgagccagctaggttttaaattaaggatgatttgtgccagacaagtggaaatgatgttgtctggactatttcctaatattagagccttcccttttggatctactgtgaattcttttggaaaagaaggttgtgaccttgatcttgtacttcgttataatttttctcaggaaaattcagatgacttgaggttagttcatcactctaagatcaatggtattagttctcgaggacaaacacaaaggcaaatggagttacttggagacctattgcaaatatatgttccaggagtaattggggtaaaaagaattcttggagccagggtaccaatcattaagtactcccatgaattcactggtgttgacgttgacatttctctgaccaatatgagcgcaatgtatatgtctgaacttctttatatctttgctcacttggatcctgctgctcagagattggtgttctctattaaagcttgggctaaagtcgtaggtcttacgaatccttctcctggaagatggattactaacttttctctaacattacttgttcttttttatctgcagaatgaaaggagattaccctctattgatgatctattcaaattagcaggtccaaatgatacaagatatgcagaagaaataaactgcagctttatcagagatctaagaaatgtaagattagagttagatcatagtaaaacaactgcagaactattgttaggattttttaatttctatcaaaattttgactttaataataaagctataagtttatgttctgcaaaaataattaataagctcgattactctcctatgtatattgttaatcctcttgatagaaatctcaatgttacaaagaatgttagtcttgaagaagtagaaagaatacgtgttgaggcaagaaatgcagcctgggcccttgaaacaagttcaaggctagttgatttatttcgcagctcgcctgaatcattaatgtctaaacggaaatatatatcaagaatggtaatggtaaaagatctttttcaaacatgattgattttatttaattattgattaatacaaattgattagtcttcttttgttaattaattacagggttttttatgataattactctttgtggaacaatctgttttgttgatgtaattatgttttttataaaataattacagaaataggattagtcagtaatacaaaattgaattttatagacccatgttaaaagtaatcagttataatctatgtatgttagattctcctagaattttctgttacctacgtattatacagaaagatgttcctattttaaaatagaaaaagtagcaggcaggttcattaaataaaatgagacaagcattaagtaccatgtactttgagatagatagataaatgatgttatggtttgctgttaggcgattgatatgtgtcaaggatttaccaagaatattttggtggtatctctgtatatttgtgttgcaaaaataacaacttacttgccttaggcctggcttgaaactttttggcaggataatacaagaatagtcataaatgagtccagaataggtataaattatcactcggttactaaacaggtgttgaaagcatcttgaaatgacatagttgttttccataaaattgcttactttactaagtatttttacaagaaaaattcctaag

SEQ ID NO: 364 - DNA, 8299 bp, Nezara viridula
gttttcgacaaatagtatatagtagccatttgccaaacagtgacgaagttagcttaatgaaagccaagttacctgtgtacagttgaatttttgttataatgttaatctgagcctgtgtatataaatattcagcccgatgttggacttaaatttttatttatgtagttattacgcggcaatagataagttccttcggggaagcatttcgtggataccgaagaaagcttcaaacaagtttgaagctttcgaggccgtattcatggaactatgaacctggactcgttgactttaactttgtcacaaataagttatttggttgtaaatttaacaaaaaaaaattattctgctactgttcaggagatcactgagctggtacgtgaatacggctttgaagcagatcgtcattatctatataaattattctcttgttttgaagttggattgacgtcaaaggaatcatcccaacttcaactactttcggaagagatagccgcattgttgtcaaagcctgctcttgaatcttgtatttgttttgcatttgaccatcttattaagtctaagggtccacgaataagttccttgttgtctcaattgtgcaaggccttgaaactacctcttattcaagaagtcatttttgggatttctcttttgaattcagaaaatccagatacgcttaatcaggctactcaatttttaaggataaaattgccagaacttattagatcatatatcaattcagatactaatagtagtgctactgaaggtggtcttcacgacaccactcccgaggttcttcacattataatcactcaagtaatatcagattcctctgaacaattaggagttacaagtgagacaagagaagcattctttcgaaatttatgtagggactttcctagagatttggtacccattgtggtagcacctttattatatttagacaactctgaattatcaatggataaacttctttctgactcgatgaacatgtctcacaatatggtcgaccccagctttgacgacatccttggtgaacttggtatttcatttactagcagtgttgaaaaatgccgaggacatttatctcaacttgttggaagagatttaaaacactcagatatggctagaattctcattgtaatgttgaaatctagaggagtagttgaatattggcaagatactgattcttctaaagaaaagtcacaagatccatcacatgtttcttccccatggagtgttgaaaatctagtccaagctgctagagaattgaatccaaaaatcaattggagtgatgttttacttgagcttgaccattctgaattcttagtgaaagacagacatggtttacatttgattatttcagcaattagaacgggtttacaaaatcaagcattttttccagacagatttccagtcgaacacatatacagacattggaagaacacagaagcccaggtttcattggtgcaacaaattttgaaaaatcctgatatattttgtttttctgatcacccatttcatccagttgctgtagatattttaaaagcaccaccagaaactgaaaataaagaaattgcttcatggcgatcattggatttgatcgagctagttgtttttattgctgaaagaggtcattttcaagaagttcaagaaatactgaaagttccaatccagaattgtcctgatgttctattcttaggattgcttcaaacaattcatcctcctctggcaacaatttctccaattcgtcaagaaatttttgccaatcttatgccttcatttctagctaatcatcctaactctgctattatttttcatcatgcttggcatacccagaatattgccataaaacaaataattatgcattcaatggctgactggtatttacgaggtgacagtgatcagtcccgacttacgcgaatcctcgacgtagcccaggatctgaaagctttgtctttacttctgaatgctcagtcatttccatttgtgattgacttagcctgtcttgcttctcgtcgtggttatttgaaactggaaaaatggctcacagataaaataagagaccatgatgaaccatttatcactgctgtacttaaatttttgcagaaacgtgtccctcatatcagtggattagtaaaagaagacagcatccccaaagcttcccagttccatcatgaaactctcagtacaatcctactttgtttgcagacttgtgctgggagtgtttcacaagaaatggcagaggctattcatagtgtaatagctgcatgtggaatgataaaagctaggactgctccaccaggagttctgagaacgcaccgtgctctggacagttttacaccatcatctgttttttcaagccaagtggattctctaaattctggtatcactggaatgtcactcgctacaacgtcatctgcctttactcttcctgctggtttggggcaacttgtttctaatcctggttcaccatccagactcatcgctgcctctcaatctccagcatttccaattatgcctcttggagctccggggccttctatagtgcctcaggttggaattcctgctgctatggctcggctacaacttactcaacaacagcccattgaaaaaactagaatctttccaaaagacatagaagatgaagctaatagttattttcaaaggatttacaaccatccaccgcatcctactatatccattgatgaagttttagatatgctaaaaaagttcatggaatctccaaagcaaagagagcgggatgtattctattgtatgttgcgaaatctgtttgaggagtacaaatttttccctcagtatcctgaaaaagaattgttcatcactgcccagctttttgggggcatcattgagcgaggtcttgtatctgattatcgggagcttgggatggctttgaggtatgttcttgatgctctcaggaagccacatgatagtaagatgttttattttggtattgctgctttagatcgtttcaaatctagacttaaagaataccataagtattgtgaacatatcgcaagtattccgcacttctcgcagttcccacagcatttgatagaatatattgaatatggcatacaatctgaagagccaccagggagacctcagggcccaattttgccaggaggaatatctgctgtaactacggcttacaaaaccttaacacaaactacctgtactacaaccaccactgttgcagttactaaggcatctactacatcagttatttcttctagaccctctatagctaatgcaaccaacatagatacattattggtggctactgaaaaagaagaaaaaatgactgcccctccagaagctttacaggataaagttgcatttatttttaataatttaagtcagttaaaccttcagaccaagtgtgatgaattacgagagattgttggtgatgaatatcatgcttggatggcccaatatctagtcatgaaacgtgcgagtattgaactgaactttcatgcattatattctaattttttggatgtactcaaggcgaatgagctcaataaattagttcttcaagaaacatttcggaatattagggtactccttagatctgataaaggaatagctaatttctctgatagatcactcttgaaaaatcttgggcattggcttggtatgctaactcttggtcgaaacaaacctatattgcatgatgatttagatttaaaatcattattagttgaagcatatagtaaaggtcaacaagaacttctgtatgttgtaccatttgtggcaaaagttttagagtcatgctctaaaagccgagtttttaaacctccgaatccatggactatggccattatgaatgttctttcagaattacatcaagaagctgatctaaaacttaatcttaaatttgaaattgaagtcttatgtaaaaacttatcactagacgtagctgaattacaacctaaagtatatttaaaagacccagaaaatttaaagcatctggagcatcaactttcacctcccaaaattaaaagtgaaacacaagctactacacccattactccatctcaaacacccacgcagcagcagcagcaacagtcacagcagcagcagcaacagttacagcaaccacaaccacagcctcagcaaccccctcacccagtggaagacatgactcccagaatgaccaatagtacaccaactctagctatccttagtccgccagaacctagattcaattatatgcaaataaatgtatcgtcaacagcaagtattgcccagcatatcactgtaaattctcagcttcctttgttacaagcccatccaaaattgaaacagtttatttgtcaagctgttgaaagggctgttcaggagtggattattcctgtggttgatcgtgctgtaaaaattgctgttactactactgaacagataataaagaaggattttgcattggaaccagaagaaacaaggatgcgtcaggcggctcatcatatggtgcggaatttaactgcaggaatggccatgataacttgtcgagatcaacttctagtgtctatcagcaacaacttgaagaatagctttcttggttctttacataaccctaatgagcaacaaaagaatttggttgaacatgctgctacaattattgctcaagaaaacatggagttagcatgttgttttatacaaaagacagcaatggaaaaagctgttcctgaaatggacaaacatttattacctgaatatgacagacgtaaaatagcacgtaatgaaggtagaagatattgtgattcaagtgtacttacatatcaagctgagcgaatgcctgaacaacttaggttaaaagttggaggtgttacagctcagcaaacagctgtatatgaagaattagctcgaagcatccccggttttcagcctatatcagaaagggatgctgctattttcatccctaaaccagtgccgtattcagcccaagatgaatttgacactatttttgaaaaacttacatctgaattagagcattatgttcaaacaattttgggagctcaagttcttcctcaagtacacaatattctggatttacttgttatactacgaagagaaagagaagatggttatgctgtgcggttagtacaaaagactgttgaaaatttaatggagctatcatcagttaccacaatggatcctgaattggttttgagacatcgtgatttatacttaaggattttaaaaactttgcaagaccctcgtgcctttggaacacagtggacaaataaacatgttacagtgactgttttggaatgtcgagaagaataccgatacaatttggaatgcatcgatgtcttagttagatcacaactaattaacatgcaacagtttgatgtccagttagctcacttcatggaaaatggtcagaattatgtagctgtaacttttgctatgcaattagttcagttatatcttatagatgacagaaataattctgtggtaacggaaagtgatctattcaatgtagtagaggtattggttcgaattaatgcccactctcgccaacctccagaaggattaaactcattgattgatttattgagagctactcatgaatcgaacatcttttcggacagaactcatggacctgcagctctgattatatcaggaattcatcatggaaaggctcgtgagtatgatgaccctcctggacttgcagagaaaactgagtatcttcttcgagagtgggttggaatttatcattctcctcaaggagctaaagatccaaataaagcattttctgtcttcgtccatcagatgaattgtcatggaatattaaaaacagatgatttgattactagattttttcgcttgagtacacagatggtagtggaactatgttataggcttcttcccgatgtgactggaacttccgcaacagcggttaggaataaaatgtttcacactgtcgatgcctatgtaaaactaatttcacttcttgtcaaacattctggagatgcaaataacagtcagacaaaaattaatcttttgaacaaagttttgggaatagttgcaggtgtattacagcaagatcatgaaacacaccaaactgaatttcaacagttaccttaccaaaggatatttattatgctttttctagaattgaatggtactgaaccaattttggatgcaataaatttccagatattgacagcatatttccatacccttcacatccttagaccgtccaaatcgcctggtttttcttatgcttggttagaattggtatctcaccgcatatttcttggaaaaatgctgggtcacacccctaatcagaagggatgggtcatgtatgcgcaactgttagtagatctgttcaaatatctggcacctttcttaagaaatgcagaacttgccaagcccgtgacagttttatacaaaggcacgctcagagttcttttggtattacttcacgattttccggagttcctttgtgattaccactacggattctgtgatgccatacctcctaattgtatacagatgcgtaatctcattttatcagcatttcctagaaatatgagattgccagatccattcacaccaaatctaaaagttgatatgctttctgaaatatctaatgcaccaagggttttaacggaattcactctgatgattcaacctccttcttttaaaaaggaattagatacatatctaaaagctagagctcctgtgacatttctctcagacctgagaagcaatctacaggtttcgaatgagccaggtcttagatataatattaccttgatgaatgcccttgtgctgtatgttggtactgaggcaattcaatatattaggaagaagggcctcactcctaatatgtcaacaattgcgcattcagctcatatggatatatttcaaaacttggctgtagatctcgataccgaagggcgttatttatttttgaatgctattgcaaatcaactgcgctacccaaatagtcatactcattacttcagttgtacccttttgtatttatttgctgaagctaacactgaagctattcaagaacagattacaagggtgttattggaaagacttattgtaaataggccacacccatggggtttgctgataacattcattgaactcattaaaaatcctacctataagttctggaaccatgaatttgtgcattgtgctccagagattgaaaagttatttgaatctgttgcacgttcttgtatggttcagaaacaagtccagcctgcagttgaaaacgacttggccgatttgcagaacatgactacccaagcaacattctccgaagcttaattgattgaagaaacacctgcaagaataaactaatagaataaaaagcaaacaacgggcatggattacgtataaacattgtataagaggaacattatataaaaatacacaaataaatatacatgcacttgcataaaattaacaaaaattcatagaaaaaatattagtaaacattatacaaaagggtatataacagaattataaaattggacaaattgatgtaaacaactcaatataataagaaaaaatgcaaaaaaagatactgacatgaaaaatagcacgagagaaaaaatcaacaaaaggcaaaacatcactaacaaagcaacatactccgttactaaatttaaggaagaaacacccgcaggaacaaactaatagagcaaaaaacaaaatacggtgaataattgaaggtaaagagcgtaaagcaggaaaaattataagcagatataaataaatatacaaacaaccgaaaaatgttaacaaaatttatgagataaaataatattctaccagacagaaaagaatgtaatatagaagaataacagtataaaaagcacaaaaaacaataggacagacgaaaaataaaatctaaaatatgtactgaaatgaaagtcatccagagaggtatagaaaaaaaaatgcaaaacgtctgtgacaattctatttatttgtttactatatttgagtcagcaatagcctcctttactgtgttatatagctaaatatgtgatatggtgtatatttgaagttatggagcttaaggctgttaaaattattgtcaggtgtaagtatatcttgtaagtacctaaaagtgttaataaaatttatgatataaatttattttctttgagtcctatcagaatttaatgtggtggactatttgtattaaaagcacaaatgagaatatgacggacggaagatgcgatgttaaatatgtactgtaattaatttcttgtatgtatttctgtaataaataatgcaaagataa

SEQ ID NO: 365 - DNA, 1052 bp, Nezara viridula
taaacaaacagtagtagaaacggaaaaaacaaaaacctgcaaagaccgcttcaatttgaatcagcttataaaatagttaactatcaattgtcttgggagtttcaacaggattggatattatagctagctgttttcttatagcgaaataaagcagcattaatatgaaacccgtaataactcgtagatttacgatgagaattcttcgaatctctctggttattgtcaaaaatgagaataaagttctgcttggtttatgcaaacgtggatttaataaagataaatactgcgttcctggaggtgtcctacaacctaaagaagatttgcagtcctgcgctattaagaaccctaaagagcagtgtggtatcacaatagagaagttagagaaagttggaaaaatagaagttaaatttgcaggtgtccaagaactgcttcagttccacatatttatgtctgactcatactcaggagacattaaagaaactaaagaaatgacacctgaatggttcccattgagtgacgttccatatgacaaaatgtggcaagatatgacagtctggttacctcatgtacttaaaggaaagaaagtcaaggcattctttatttaccaaaacgaggagcttatttatcaagatttaacaacagaagctaattttgggcctaggacatcctccagtgttgcaatagtataagtaaaaattaaagtaaaagcatgagttaaaataatatggatgacagaaatttacttgacaaaatatttcatcattcaagatctattcgatttgatttattttgaagtactgaaaaacaatgaaaattcaaaaggtccaaagcatccttttttactacagagaggcatttgcaagaaaataaggcagtataagcattacatcttcccaataaagagttattttgtttctgatagtttgtttttgttttaaaacaaaattagtgcttaaatttgatcaagtagaaccaattcattaggaaatatataaaaatattgagaattcgcttgtatatcaaaaggcatatttttgtttatttatttcaag

SEQ ID NO: 366 - DNA, 5423 bp, Nezara viridula
aaacaatttactatcgttaaaaaggtattaacaaaatctgtgtagcttgttgaatgatttagcttcaaatcaaataatagttattaaaagttagatggtgtgtatgtgtataattagtaaatgttgtgaaatttcttagaagaaagtgcatgtaaacttttttatggtagttatttaaataattttttataacaaaattacatcagttttgaagggaattcgtcaagaaatataggtaataccaagtaactattttgttacaatttggcgcggatgaataaatgccatgcgcgctacggctatgacccagtttcaagccctcttccataagaagtgtaggtcttttattgtgaggttgtgtctcctaccaacagggtcacacaacccactttttcgtgattaaaagtagttaaaacgccaaaaaaattataaaactttaaaaatacaaaaaaatagtaaaatattataaaaaaaattaaacaaattgttcgtttatcgttcgtttgtgaagaagtgcaacgtggtctgggataggactctgacgtactgtgagcattcgttcgaagcaatttgtgagccccgttctttttattcggtttgtgttcttgtcgaagctttagcaaacagcaaaaatgaatacaggaccaggaggacctaattaccccatggcatctttatatgtgggtgatctgcattcagatgttaccgaagcaatgctgttcgaaaaattttcatcggctggacccgtactttctattagagtatgcagagacatgatcactcgaagatcattaggttatgcatatgtcaatttccaacaacctgcagatgctgaacgcgctttggatactatgaattttgacaaccttaagggtcgtccaattcgtataatgtggtcacaacgtgatccttctctcagaaaatctggcgtgggcaatgtctttattaagaatttagacaaaagtattgacaataaggctatgtatgacactttctcagcttttggcaatattctcagttgcaaagtggcacaagatgaaaatggcgtttccaaaggatatggttttgtccattttgaaaccgaggaagctgccactaagtcgatagataaagtgaacggcatgttgctcaatggtaaaaaggtttttgttggtaagttcattccacgaaaagaacgtgaaaaggaattaggtgaaaaagccaaactgtttaccaatgtatatgttaaaaattttggggaagactttactgatgacatgctgaaagagatgtttgagaaatatggaccaattaccagtcacactgttgttgtaaacaaagatggcaagtctcgtggctttggttttgttgctttcgaagacccagaagctgctgaaagagcagttgaagatctgaatggaaaagagcttattgaaggaaaaccactatatgtaggaagagcgcagaaaaaagctgagcgtcagcaagaattaaaacggaaatttgaacaactcaaaatggagcgtatgaaccgttatcaaggcgtcaacttatatgttaaaaatctagatgatactatagatgatgaaagattgaggaaagaattctctcctttcggaaccatcactagtgcaaaggtcatgttagaggaagggcgtagtaaaggatttggctttgtatgtttttcatctcccgaagaggctaccaaagcagtaactgaaatgaacggtcgtattgttggtacgaaacctttatatgttgctcttgctcaacgtaaagaagatcgtaaagctcatttagcatctcaatacatgcaaagaatggccaatatgcgtatgcaacagatgggacagatctttcctactggtggtacagggggctattttgttcctactttacctcagccccaaagattttttggacctgctcaaatggcacaaatgcgccctcagccccgttggccagctcagcctcaagtcagacccagcacacaagcagctgcatcaggatttcccaatatgcaaggcccattcagaagtggaccacgaggtccaggtgctgctggcggtggtggcggcccaggaagtgccgccgctgctgctgcagccatgcgctcatctatcagtgctgctgctgcagctgtggcagcggctgggcgaccaacagccaatgctgctgctgctgccgctgccgctgctgcaaacccagctgtcgcccggcaattggcccaaggaggttctcagggtgcccctgtatctgtgtctgctcaaggccgtcctgcaaattacaagtacaccgcgaacatgcgcaacccacccccaatgggaggtggagcaggagcaggtgcaggtggacctccacagcaagccctacacattcaaggacaggaaccactcaccgcaagcatgttgtcatcagcaaaccctcaggaacagaaacaaatgcttggagaaaggctcttcccccttatcagaagtatgtaccccgatctggctggtaagattacaggaatgttattagaaattgataactcagaattgctacacatgctggagcatcatgagtccctcaaggccaaggtcgaagaggctgtcgctgtactacaggcccaccaggctaagcaagctgctgcatctgtcaaaaaagaataagagaagtaaattattatgggttaggctaggcccatggccaggcataactttaggaatgggggaaacccgaccacgctctcttcattcgcccctttcacctatcgaaaagaataaaggaacagaaataatgccttaaacttaaaaaaaacaaaaaatttgctaaaaacataaaaaagaaacaagtaacagtcttgaaacaatttttataaatattaacagatcattttcagtaatccccttttgcccatgatgtcttcaggcgaggatattttttttattctcaaattatgttctcccattcctgttcgaaatttatttttgtaattttcctttttctttcttttcttttttttacaactattatttctatctttcttgtgacattgcagcgtattgacattatttttaatcttaattgtaatcttgatttgttttgtattattttcttggttcttaattattattattgtattcatactattaattatattataatggtgtctttgttcaataaatctttgcatttatttgcaacattaaaatgttttggtaaattttatgtatttcttttaattggaagttattctggatattgttttatgaccattgtggtgctgtggtggaaaaaaaaattaaaaaatcatcttttccttttattatattttttacattttaaagtaaaacattccgtagtttttcctgaatatgaattgatattttgacttcatcacagcaaccagttattaaattaaaattgatttttttacatcaagttatatcaattttcttgatttaacttaaatattccactcctgttttccattatattaaaatacccttaagtccttatttcatttacacgagcttagaaacatttacaaaaactgaaaatgtggattatcagttgttattgttttcattattatcctgtgtttattgcttaaaattttatgtaagatgcttgtcagtcactggacttaaagtattttttttataaaaactgatgaaaaaaaaaattccttttaaaaaaatagtaaaaacatccacattacgttgaagtgtttcggtattaaacatattaataaagtgagttaacatttcctttttattgtgtttagtacccagttaatattgctggtttaaaagttgtatatgttttctatttatgtggaatgaaaaacatgtaaaaaaatgaaactatgttaacacatacaattaaaaaaatgattgaataaaaaaaaaataacacaattaccacagttcaaggtattgcagattaaaaattaaaatagtcgcactttagaataatgaatagataccatacagctaagctcaaaccaaggataataatttaaaaagtcacttccaagtcttttaatgatataaaatatagaagtccattaataaactaccacacaagaaaaaaacataaatatagattacttatgctttcaaataagaatgtttagtacttatctaaaatttcaatagatttaaaaagggtatttcatagttattctatttttgaaaaataaaataaaataaaagccattacaatttttttgtttaaagtttgataagtacccttataaatttaataactaaataataaaaaaaaaatagaaaccaatattaaaacttttcatcagtacgtcatctagggaaggaagattaagttaatcgaaatacagctaatttcctataagagaaaattggtcatataaaatagaaagataaatttttgattgagtactaactgtgatagaagtccaaatgaaaattatatgttaaatatagctcacgaagaacttatagaacacatataactgcaaaatcatcatactatcaagaagttacaattagagaaatatcacaattcgttgatttgtgctgaacttataactaaaaataaaaattaataattgaatacaatatcaaccagtctaaatcaagtaagctaaaaataaaagtcactaaactttaatatcctgtgtaataggagtcatataattagtaagatatttgtatacagatggccaaatttcatctgaagtccttcctgaaaattcttctagtatccctgcctccctataaaagtctagtactggaccaagagtcttcgaatatacatcaagtcttttctgaaccgattctggtttatcatcatctctttgaacgagtttttctccagtcacatcatctaacccaggaactttaggtgcattaaaatctatattataaaccctaccactgggcatatgaacccaccgtttctgtattctgtcaacaataacctcaaaaggtactactagattcatagcagcatccactggggcttctttgaataaaacttcagcttgttttctagttcgtggaaaaccatctaacaaccagcttttgttggcacttttactgatttctgatagaacgaccccaaccataacttcatctgggactaattgacctttgtccatatatttttttgcatcaagccctaaaggggttttgttcaaaatatgatggcgaagtatgtcgccgctagaaatatgtttcatttcaaattttctaacaattcttgaagaaattgttcctttacctgagccaggagctcctaaaataagggccctaaaattcttcagcatgttgacagttgtgctgctacaaatcaaaagctgctaagtcgttagtaacgaggatttaagtactagacgatttttcaacacaactaaactgacgtgccacaaacggcaacaactgacatactagatttagaacaagggcgctcaactggtg

SEQ ID NO: 367 - DNA, 842 bp, Nezara viridula
agacgtttgaagcggcggaagcagccattgaaagcgtcaatggcatgatgttgaacgaccgtgaagtctatgtgggcaaacacttgtcgaaacaggatcgggaatccaagtttgaatccatgaaacaaaactatacaaacatttttgtcaagaatcttgattcaaagatcaccgatgccgagtttgaagagctctttaaaccttttggaactatcacctccattctgcttgctcatgataatgagggcaaacaaaaggggtttggctttgtcaattatcaagaccatgaactggcattgaaggcagtacaagaattgaacaataaagaaatcaatggccaagtcatctatgttggccgtgcgcagccgaaacgcgagcggttggaagagttgaaacaattacatgaactggcaagattggaaaagtttgcaaagtatcaaggggtgaatttgtttattaaaaacttggacgattccattgactctgcggttttggaacaggagttcctgcagtttggtaccatcactagtgccagagtaatgatggatgaaaatgaaaagaagagcaaagggtttgggtttgtttgtttccaaacacctgaagaagccaccaaggcaatcactgaaatgaattcgaaaatgttgaatggtaaaccaatttacgttgcattagcacaacgccgcgaaatccgtcggtctcaattggaacaacaggttttggccagaaaccaaatgcgtatgcaactgcaagccgcacagaccggatccatgccacaattaatccctcctcatatgttataccaacaaggaggattcttccctcctcctcctcccccacctccc

SEQ ID NO: 368 - DNA, 6849 bp, Nezara viridula
gatgtaatttgccaagcatgagtgatgatattttctaattcaatttaggtcggacattttatttttcgtattgataaacaaacatttcctgttttttcactatatatattcgattttcaacaattattaatctacttcaaaacaataaaacttcaaatcataaaactctcatataagagcgtgcattaaaacgcttatacactacaatataatcattctcccaaaaatatttcaatacctcgattacttctctctttacattttttattcacatagtttcatttaaaacttctgcactacaatcccaaaacagtattgggcaaaaaataaacatagtcgttcactttacctaaaatagctctactgtacatatacacaataagaatttaattttatatattattcttggtactagttcgaaagcactactctttcagctatcttggttgatgataggttatccacaatgtttcagataaggtgtacaacagatagcaccgggcagcgccactattgcggaggggtagttttgtaccctccacctctcctttattttaagtaaatatagaaattatatcgtttaggttacatataatccgcctttttttaaagttagcattcttttcctacctttttcattgttttgttaattgattattaatcaatcgctagagctctcctacatgatcctgaaacatttcccttagaatctggtaatgccagtatgtacctcagtagactgaaaatgtgttttattgctagaagatttaagtaacatataattgataagtataacccttatccagcatcaaaacccttatagaaaattgtttaattcttcctgaattgtattaatattggacatacttagataatgtacaattagagataaagtgtcacaattaaaacaaaacttaagttaataaacttctttcatttatgataaggaaagcgaaaagcattaataatgctgaatctcgaagcttaaaaaacaaaaacgggcaatatataaacactacaattataaataatattagtaatatataatggtaaaaaaaattaatgtaggtaaaatcagtaaagaataacaactgaaaaacaaaaaatagtgaatagatatattaaagagacaaagaaaaagaaaacctaaaaaaaatgaaaagcacgatataaaacaaaggtaacaataactaataatggaaaaagaaagaaaaaaggaggagacaagaaaaaacccaagaaataaagaaaattacggaaactagaaaggggaaacatgaccagaacacggaacaaaaaaacacaacagcaaaaacaaagagacaaggaaagtccgaaaataaatacattttccgggttctatgatggtcacttacacatccaacaaaatgaatgacgattcagcgaatttctgtccaagttacttcatctaaacctcaagaactaaatgcaacactgtgaatgatattgttttgaagagggtttgttttgaaaaaggcattgaattgataacaaacagtgaaaatgggtgtaccaaaatttttcaggtttattagtgaacgttacccatgcctctgtgaagtggtgaaagaatatgagattccagaatttgacaatttttacattgatgctaatggaatcatccacaactgctctcaccctgatgacagtgttcatttcaggattagtgaagaagaaatttttaaggatatattttactatcttgaggttttatttaggctgattcaaccaaagaaactgtttttcattgctattgatggtgttgctcctagagctaaaatgaatcagcaaagaagtcgaagattcagaacggcaaaagatgctgagttagcccttaaaagagctgttgataaaggtgaagagctgcctgacactgatagatttgattctaactgtattactccaggaaccgtttttatggacaagctacacaagcagctgcaatattttatcaagcataagatctcaactgactcaacatggcaaaaaccaaaaattattttatcaggccataatgttccaggtgaaggagaacataagattatggactatattaggtacttgcgatctcaaagtgattgggatcccaatacaaggcattgtcttcacggcttggatgctgatctcattatgcttggactatgtactcatgaacctcattttgctcttttaagagaagaggttaaattttcaagaactgcaaaaaaacctaaaaatgttgaagaaaccaaattttttttacttcatctgtctatgatgcgaggttatttagaattggaattccagtcattaaaagagaaattgtcttttgaatatgatattgaacgcatcattgatgattgggtattgatgggttttttagtaggtaatgatttcattcccaatctccctaagtttcacattgctaacaatgcccttcacaaattgtatcaagcttacatggaggttcttccttctttaggagggtacataaatgattatgggactttgaatttagaaaggtttgaaaaatacttaacaaaactagctgaaatggaactagacaattttagagatatacaagctgatattaagtatttagaaagtaaatcaggaaagagtcttctttctgatgaaactgatgatgccttatctaaatttgatgatgatttaatacgcctcatggaagattctaataaactgtttgaaggtgatgttgacctggatttcgatagttctgatgaagagcaacttatacaggacgagttcaaacatcataaggcccgcttctatatggaaaaattaaactatgagaatgtagacagtgaggttttgaggagccaggctgaatgctatgttcgagctatacagtggaacttgttttattattacacaggttgtccatcttggtcgtggttttatccccatcactatgcaccatacgtttcagatataaaaggattcactgattttgattttaaatttgatttgtcagctccgtttcaaccattccaacaacttcttgctgtcttacctgctgcaagtaaaaatattgtacctgaacccttccaagacctgatggcttcccctaattcacctataattcagttttatcctcctgactttgaaacagatttaaatgataagttgaatgattgggaagcagtggttttgattccgttcattgaagagaaaagtcttttagatgccatgcaacctcactataaaaacttaactgaagatgaaaataggagaaattcagtacagcctatggaaatttatgaatatacttcaattaatttaggtcgttgcgaagctcctgaattctttcccccaattgaaaataattatgctcaaatgacagctctttcaagatcagatattgctgtcgatcctagaaaagttgtaaaaggtatacttcctggagctctttctggagcgagatatggatttccacaactgcgtggtatttcttttaaggtagaattaaaattggcaaaggttaaagtttttgaacatcctagtagaggagaaaacatgattttaaaaatagatcgaatagaatttgaaagtgaagaagtattgtattccatggctgaaaaactgcgtaacaatgtcatttatgttggttggccacatatacagaaaggaagagctactgctatttcatccgaacaatgtcagtttaaaattgaacacaataaaccacctgttaaatatgatgataaaaccagacataagcaggatgctgctgatcttcaacaaagatatttgtcaaacttgggaatagatctaggaaaagtggatatcataatttatataaaaactgttgtagatattagagaacaatttgatgagagcaatgcttctaaaacttgtggaaaaagaacttacatgtggagcgaatcaagttatccatttccttatcagacttatctagacctaaataaatccaaattaattgacaatgatgaagaattggaacaaatgaaggatttaactgatatcttttcagtgggaaaaaatgtatttctactggatttattaaactatgggatgttaggaaaagtgaaatctatcgaaaatgctaaaatggtaaaagttgctattaatgtagattccaatttggatctttctggcattcttgatctttcacataaaacggatcttaagtattatcctggcagcatagcttctcagaggcttggaattggcagtcatcttttttcccgcttgactggatctatttttataaagaacgcagatcgtgatgaaagaatcaatgttggtctaggactaaaatttacaaaacaaggagaagagctcataggttatacaagaagagaaggcaatatttggtattattcagaaaaaactattgcacttcttgatgaatatatggctaaatttcctgaattgtttgaaaaacttcaaacaatgaaaaatgagggtgacatgtttctttctaaggatgtctttccagataatacggatgaaaaagtgagtgaaattagaacttggcttaaagcacaggctcatactagtgcagagagaaggccatcaggttcacagatcttaactcctgaagccatgaaagaaattgaaaaacgtgttattgaatattgtgctaataaatctgataagactattgaaatcactgtcaatccttcaagtatatacattccgaagccaagacttagcaagttgcctcctgatccaaatactactgtcagcatgttggatcgtattgtttctgttagagaaaaccattgtataccattgggtttaatggggacagttgttggtgttgacaaacctggtaacagtgcaagtgcattatatgatatcttatttgacagtcctgtgattggtggatcatgccgttcctgtgtgcagcctcgaatttacaggcttccaagtcaatcatttattaatatctcttacggaacaagaaagtctggcaaagtaactgtttctactgctcctaaaatggcccatgtcaatcatacaaatcttggagaaccttggagagcacaaaactaccaaaaccctcgaaatgaaaacaggttttaccagatccctaggaatagagaatttaatcatcaacaaagtagagaacttaattttcaacaaagtatccctcaaggcaatgactcagtgaagcagttccttcaaagttttaatcctggaaatcaaccatcatttcctgccagcccggttcccccaactaataataggcagttaggtgccgattcagaatttaaagctatgtggaatttcttacagaaccagaaagtacctgacgataagtctttgcgacctattcctcctacaaagatcgctacatctcctagtgaaacagtagttgagcaaaccattgctcttcgtaaaatcctcaagttgaatgaaacaccagtcctaccagttaatcaacatttcactcctgaatttcaacctcaactgatgcagcatgccaataacagcaatcgaagggttagcaatatggttcctcacaataccagtaattttgttttcaatcaagggagtataatgaggccaaagacttgcagtcatcttaattgtgacctagagttaaggaatttatgtgttaataaaaatcttgaaggacctagatatagttttaagccgttagcatcttctggagaaatatcatgtattttaacatttccaaatgatatcggaaaagttattggagattcttgtagaagtcaagaagaggcaactgaaaatgcttcttgtaaagctattaaactaatcttaaagagggaagaaattgtgaggagtcctttaggttatagaaatattcatcgaccacctcaaccaatggccatgcaatcacaacagtccacctccagaattggaatgaaccagcaacttcctactcctcctatgcaatggtgttctagtaaaaccaataatcctgaaatgcagttttcaccagcgatgaggaagctgtctggtagaacctctcaggaacaggtaagatcaccacaacaagcattaagtccagtcattccaaactctctgcatgaagaatcaagaagttatggatcaagagctgtgaaaaatgaagagaaccacccttcacccggtgaggaaggaaatcaaaaacctaagcctaaccaagttcgcagatctgcagcaaaaacaaaaagtagaattgctgcaaaattttcaactccattacctgatagcaaatagttagctgtttgtgtataatacttaaattaattaatatagatttatataaatattatatatatttataattgtgtacattctgaaggaaacaggttttctattacatatttgtacatatattacatacctcatatcatatacctgttataggaaaattaatcaatgtaataattaaagtgttttatttaactcttcagcttttatgaaaattatatcttcttaatctcttctcagccgatgaattgctgaaaattgtgactagacagataagttaatttgtaaattaagaatttgctccttgtgataatctttatcgttttaattttgtataacactgatattgtaaaagtcttttgaaaattttaggtatttcggacaatggttctctcatacctttatattttaaatattttatgttataactgaaataaggacttgtcaaaatttaaaattccataggggaatatgtatgaccaatttttctaactgatgattttattttttgttattgttattttcttttgtgtaaacattttatcataatatggactgaaaaagagtaatgtgtgtaaaagaatcattttaagatctaattcaataaaaattatgcctttttgaacagtaaaa

SEQ ID NO: 369 - DNA, 2637 bp, Nezara viridula
atttttatcgatattttaacttttacaggtttatgagttaatgtactgtagttagtgaagtaaacatagtaacaatctatttaatccttgtcgtgtcaaaattatactgccacagtttgtctaaagtagttacattatatacgtatcatctttgtcttgataagaccggtgattttgactcaagtcgcttttcttaattagttttgatggacccaaaaatcggttggttccaaacagagcaagaaggacccagcaaggagtattggatgaaggtttgggataactttcaaaggaccgtaggccatgttggtagtaaaactgtagcagagagaaagtcacaggaacttggcacttctcaacacctgccactacagcaacagcaaaaggaaaatcttgaaggagcagacccagccaatgtttggaacaataactgggcctcaacatattttatgaataggcatcgtgacaatcttataggcaattatggaggatgtccatggagacctccgaacaaattgtatgattcaaggcctattgttgcgttgcacgaagaaatcaatgatttttacgaatacatgtccccaaccccagaagaacatgctatgcgtaaggcagttgtcaagaacatcgaagcagtcattcttgaaatgtggccatcagcaagggttgatgtatttggttcattcaggacagggctctacctcccaacaagtgatatagacttggtagttataggtgattggacagaaactcctttgaggactctagaagatggtcttctgcaacgaggagtctgtgataaagataacataaaagttcttgatcgagctactgttccaatagtcaaacttactgaaaaatcatctggtgtaaagattgacatatcatttaatatgaacaatggattacgctctgcagagctcatcaaagaatttaaggctaagttcccagcactaggcaagttagtacttgttttgaagcagttccttctccaaagagaccttaatgaagtctttcatggtggcatatcatcatacagccttattttgatgactgtttcttttctacagctccatccaaggtccgatgtaaattgtgtggatgctaatcttggtgttttgttgattgaattctttgaactatatggtcgcaagtttaactatattgtgactgctattagaactaagaaaggaggaacctatattagtaaacaggagttggctaaagacatgaaggatggacatcgttcatcagtattatgcatcgaagatccactcactcctggcaatgatattggacgaggttcctatggtgcactccatgtcagacaggcgtttgagtatgcctacataacattaactcaggtggtaaatccactaaacactgaacatcttcttgatcctcaggaaagtattcttggtcgaattgtaagggtgactgatcgtgttataaattatcgccaatggatcaggaacaagtttcagttgaaatcatcatcaatgtcaccaacatcttctgatatcagcctttcctctctggcatctagtgattctgaacctgagatgatccgtgataaggaagaatcctctatggctaatcgcccagttgccattcaaacagaatggtccaatagttctaaacctgagaatggacgtgtaagaccacaaacttcaaaactgtttacatcacaaactggcttcatccgtatgttcaacaacagcaaacggactacctctcaaaacatgagaaagtaacgagttgcttcaaatcaatgtcagtaattagtaaaaagaaaatcgttctccactaaatatattttgttggttcgcacataaccataatgagcgaacagacaggacaataactaaaaaaatgttgataccatcatatagatggttaacacatttatctaatggttaggacagcatgatatggttgaaatgagttcctgacttgtgttcacatttgaatactgatatatcttttcttttatcttgtcttagttatacaaaaatacttagtttacttttaaaaaataaagtaatataaatatcaagaaaataatctgtaagatagaacagataaaaaaaaatttgaatattttttcttagcttttttctttttaatttaatttttgacatgaaaattctattaaagtttattattaaaaactattttaaaattgaatttgttataatctaaaaagattgtattggttacttggtttttgaaagattatttggtgaaaaagaaattataccattttccaacctgtacttaactattttcccccatataattcaggccacagtgacagattccataggaatagtagatagaactttttccattgaaaatattttattttgacagttattgttttaattggaatcaactgatgtgaatgaagagttccaaagtaagtgcatatgtagcatatggcctaaaagaaatattgggtctttaacgtcaataaatattatgatttacatttttataatggaaacagcacacttatttatcgagttttaaataattactaatgacatcaatttcagctttatttttttcttgtaaaagattcatttttaatttaaatgaaaaatattatagaatgtgctaagtattacattccgt

SEQ ID NO: 370 - DNA, 3630 bp, Nezara viridula
tgaaatgggggttccagcatttttcaggtggttgaccagaaaatatccatctgtgatagtagattgtgttgaagaatcgggagatagatggttgaccagaaaatatccttccgtgatagtagattgtattgaagaatcgggagaagatggaaaagaagtggattcctctaagcctaatccaaatggagtggaattcgataatttatatattgatatgaacggcataatacatccttgtacacatccagaaaacaaaccagctcctaaagatgaagatgaaatgatggtagcaatttttgaatgcattgatagactttttaaaattgtaaggccccgtaaacttctttacctagctgtagatggtgttgccccaagagcaaaaatgaatcaacaacggtcaagaagatttagagcggctaaggaaacagctgaaaaagttaaccagattgctatgattaggtctcagctggaagccaaaggtgtaaacttacccccagaaaaggataaatctagtcattttgatagtaattgtataactcctggtacatcttttatgtctcgtcttacagagtgtttaaattattatatacatgacagattgatctctgatccaggttggaaaaatattaaaattattttgtcagatgctagtgttccaggagaaggcgaacacaaaattatggattttattaggagacaaagggctcatcctgatcataatccaaatattcatcattgtttatgtggtgctgatgctgacttgataatgcttggtctagctactcatgaaccttactttactattattcgggaggagtttgtaatgaatcagactaaacgttgtgatctctgtggtcagactggacatgaattgactgaatgtaaaggcttgattgatgatgtggatagtttatctttacctacttcaatgggcgctcctactaggtatatttttgttaggcttaatgttctaagagaatatttagaagaagaattaaaaatgccagacttaccttttgaatataactttgaaagagcattagatgattgggtatttatgtgcttttttgtgggtaatgactttttacctcacttaccatctcttgaaattcgtgaaggagcaattgacaggcttgttatgctttacaagaagactgtttatcgaacaggtggatttattactcatagtggtgatgttaatcttgatagagtacagttaattatgactgatcttggccaggctgaagatcaaatatttcacaaacgacagataaatgagaggaatttcagacagcgtttaaagcaaaaaaaatatttggaattgcaacaaaagatgtttgaacaaaattgtaaagaggaatttgcaattgaagaggaacctgaaccagtagatgaggtcaagctttgggaaagaggttacaaaaaaaataccaggaattgcaaaaaaaactgtttgagcacaattttaaagaggaagtggaggggtattttgatatggaagaggagcctgaaccagtagatgaggtgaagctttggcaaagaggttataaagagagatattataaccttaaattcaatattgatggaaacaatccagaagaaacctgcaaaataggctttgaatatgttattggtttatgctgggtactaaaatattattatcagggttgtgcttcatggaaatggtattatccttatcattacgctccattcgcttctgattttgttaatattgcacgttctaatacttgctttgaaaagaatactcatcctttctctccatttgaacaactgatgagtgtatttcctgctggaagttctacacttgtgccacctacttgggctgatttgatgactaatccaatgtcacctatattagacttttatcccaaagattttatgattgatttaaatggaaagcgttttgcatggcaaggtgtggcattattaccatttgttgatgaaaatagattaagaagaggactagctcctgtttacaaagatctcacagaagctgaagttaaacggaataaattgggtcatgatcgtttatatgttgggatggatgcagattgcttccaattcattaatgaattagatcctcagatttatcagaaaaagaaagcacctttagtatccgatggtgcttatggatgtatatatatagttcacgaggaattttatcaaggagaaagtattccttctcctgtgcgaggtcttaatgctataaaaaggaattcggccatttgtgttgctttctgtgaccctcagtattcagaagattataaatttaaatctactcgcctagaaggagttattgaacctcctcgagtactgaagtccaaagaattggggaaccaacaatcatcaaataattggcgagggaaaaataattttcaacatgcatgggatgctaataaattccaagaaagaaataaccctcgtcccattattggtatggttcctcaaactacccaagctactttgggtgatgcttcttacaggatgatgagacataaccttgctgctccttcacttattccattaggtggaggttggcaacgggctgcgaggccaggtggatttaatacaggaagaccctttattaggcacaaccatggaagaggtgaaggtcgttaccgaccctacagaacgaaccccgtagaattaggaagcaggatgagaaataacggtaatttccaaagcaatgcctcttatccgccccatcagaataataatatgtttggatacaatgaaccacgaggaagaggtatgggaatgacaagacctatgaggcacccttaccccagaagataatttgttgaaactatttaaatttaagtgtgtttgattctatcacttgatgaacagtgaggtttgtgtttttatttattttctttggtaatttgtacaaaaatgaaatttaaatatttataaaataaatttaaaaatgtgaaatttaaatatttataaaataaatataacttttgactgattttctaacatctactgttatctcatgacttaggaacaataatgtggatgcagccaaaatgaaagtaatacattccagctaaaaaatgacaaatacatattatatgataagtggtttcatcctctatactacataatctgctgatttcctgaatcagttaacctcacgttaaagaggtgtttgaccagtcaataggtaacttggacaattactcaggagtgccgacctgaagggaggtgttgctactcattaggaataaaaaataaattacaaaagcatatgagaattattcattttagcctattgataaagtaattgaactagagatgtattaaataaaataaaattcaaatgttatttaatataaaagcatcttacgaaataaaataattttttggaggagagattgcccggcagtacgaaatgtctaagggcagtacagaatactcctttccatgaataaaagtatcacacttctctttggttagaatcttcatcagaccagcacggaaaaagtctgtctgtttcgtagtgttttttcaatagagattagtcttattatttagagttgccttaattcgaattgttgcaaaattgaggctaattcatgattcttagttaatgtgttattttac

SEQ ID NO: 371 - DNA, 7447 bp, Nezara viridula
cgagcgccgctccgccacaaacccgtcgctcccctcacgcaatcaaaatgaaatgaatttattataatgcgttgtccttctctgctcttgtgcgtgcctccgtctctgtgagtgttgttgagtgccggcttttttgttgattctgtgttgttgatatctctctgtcaaagtgttgttagtgtccagtgtcagttgttgcaagtggtggtgtaaggttccaagcgtgccaggacaccgcatgctcagggtcgccctcgggtcagagcgatgcggtggatctgcgggacatggatctatgggatattctcaacagcatcatcggcaagccgcaggagttccagccgcaggaggagcaccacttccctcagccttgtttcttacctcccaacatcttccccgctgatccttttacggaaagtggcaacgaaaaaaaagaggcaaactaatcatcttctacttcatcgtcatcatcagaaagcgatgacgaagaggaggaagagcctgaaaagaacggcgatgacatcgttcaactcgcccagcagcttggagcacccgagcaccccatacctatttcggagcaccttcaggtaataaatcaagaagacctcgctgcgatcttgccagatgtgggggcaggctctttggacgggttcgatgcgagcgcgcaacccgctcctcctgattccctgtccccctcctcctctgatacggaactcctcccggagcaggtggtttcggacgccatatccaggatccaaatagattctgatcccggcagggaagagccaccaccttcatcacaccactcaacccatgatgatgactctgaacgagaagagggaggtggaggatattcttcaaacctccttgaagattttgttgaaaagactgaaatgttgtcacgtggagggggaggatctggaggtggtggcgaagataagaaaacagaagctggtgcagcaccagtgagaagaaagcgagggaggcctccaaaaccacgacctccttcggagctcgaagcataccccgcccagagcaatgtatctcccgattctgggatccagtccgtcgctggttcgccagcgcatcacccttcacctgttgcctcaccagatcctcgccagaggcttaagccacccgttgcagttaatgatgaaatcacgaaaatgcaaacaacaaagggtgagctgaggcttgaacatggcggaaaaagaggaccaggaaggccaaaaggttcgggaaaaatgagaaagaaacgcggaaaacctgcagaaataaagaagcctgttgttttacccccagcagcgactgaattaaaagtacctccctacattgctggttcaatacaggccactcagatcccgagtctacctggcatttcaaaacggggaagaggcaggccgaagaaaactccacctgttttggaaccgattattcctcataaggaagtaaaacaaaagggcatttaccctcgactccctgttggacccaaaggtctcatgagagtcaagcagcacaaacacaagaaaagaaaacatcgtcctcgcgagctaacacttgaccctaaattcatcgctgaagttgacaaacttgctaatgagtttgaaaaatgtagtattagccttggctttaagcctaagtttgacgggggtatcccgtcagtctttcgtgtcaagaaagttctaaagaaaaagaaaggtaacgaaagacccaaaacaagtgataaagaatctggttcagaagttataaaagaagaagctgtacaacagagggagaagaccgctgcagtagctgtttctcctgcgcattcttcggtcataactaaaaagaggattaagaagagtgctgtggaaataccaaagaatagagaaaaaactgaaactgcgaacaatgaacaaaggctgcctcttaagaagaggcattatcatatatccagtgccacacctaccaataatgactcagctgaaaagtctgactcttcagtcgagctaaatcaatcaaaaacagttgttaaagcgaatcttcctcctgcagataaacctttggagaaacacagcaccaaaggccaaatatcagctaaagggaacactactcctactacaaacagtggaaaaagtattcaggttgctgcaaccacttcgaaggctagcgttcaggcatcttgcaatagcttgaaaagcccgacctctgtcatctcgtcggggaaaggtaatcagtccgtgatagcttctgttaaaggcaactctcccaaaccatctcctgtcgcggcagttgctactagatcagccacgaaaacagcttcacccatcgacataaaccaagggaaagcagtgaccaagccgactgccccaggcagtgaaaaaacctctgaaaagtctcacagttctaagagccaaatatccagtaaatcagccagtacccattcactgaacgttgccaaaagtcttatccaatcgccatcgttaagaaacaggtcacagtccccctccacagcatccaagggttctcaaagtgttatcacctctggtaaaggttctcaatcagtgataacgtctgtcaaaagtaatttggtcaaatctgttacatctgctgctttgatgactcgttcagcatccaaagttgcttccccatctgataccaggaatacaataaaaaattctactcctgtaactgaaaagtcaagtgagaaaaatgtttctaaaagccagctctcttcaaataaaaccacaaatctcaacagtgcaagtagtagcaaaacttcagtctcaaccccagtcagtggatctaaaacaaattctcaacctttagcaactattccaaaagcatccccaagtgtaattatttctggaaagaatgctccaactgttattacttctgtgaaaagtagtttagcgaagccttcctcgacaactggaagcacgtctgctgttgctttaggtacacgctcagctacgaaagttgctacttcaagcccagtttcagccactgtcgctccttctccacagccaaaagtaacagaaagtgtgacaactaaagtcaaagccgagaaaaaacctccagctggagtcttcgaaccatctgctaaagtaggtggggctgaagctttagaaaagatcataaaaactcctgaaatacctgtaaaatgcgtcgaagaggttatatcaaaaataaaggaaaggcttcaacctgtgaaagatctggaagggataagtgtagaagttgaaccggttcagataaaacgtaatctagacgaagatgatattaacaaaccgaaaaagaggcgagttatttgcgatgttagagttcacgtgacgaaactatcccaatctgattttccattacaggatgttttaaccacaatgggcaaacacagattgaaaatgaaaagaaaaaagtccataaataggacgggttttccagtgaaaaagaagaagaagaagaaactcctgttagaacatcctggagagcagagggtttcatcttccccaccagttctcgaagatcaaaccaaactatctattgttacttctgttaatgattcaactccagctctatctcctgttgctaaacaagaagcccagaaagtaaaagatgaaccaaaagctgatattatcgatcctaaattattaaatcctatctgcattataactcctgtgcaagagttggtgaaagaagagagtaagagttgtcagccgagtccgtgctctatcgatattaaaattcaagaagaaaaatttgaagttccagtatttgaagataaacctgttgctgatagcattacagtttctgagaccattgaaaaagaaaatgatactaaagaacacgaagaaatagctgttgaaaaaaccgaaccaattgaaaaaactaaaaccgaaagcattacttctgaagaaaaattggaattgaaaccttccaataagagaacgatggagctaagatcaaaaacagttgctagcgaaagaaggaaacggaaaagtactacggaagaaccggaaaacgaacaaactgaagttgctatatcttctacttcggaaatcaaaacatcaatttctaagcgattgaggcgacacaaggaagaacaggacgacagtgatgctgattcggtgaaactccggagaaaacaccctccaagatggaagaaaaagtatttacctgctgggcttttgtctgattacttcaaagaggacgagcctagaaaaccaagcacgagtgatcctattaaatttcgtacgacgtacaatcgtgctgagcacgaatttgggcttttacctccgcccgcttactgttcgaaatgggtaaggcagagaaagatccacttccaacttccttacgatctttggtggctacatatgaataatcaacttcctggtagagattccgttccatcctggaattacaagaaaataaggactaatgtttattttgatgtaaaaccaacgttgagctacgaagctcaatcttgtagttgtaagccttcctctggttgtggggaagagtgcatcaaccgcatggtccttgcggaatgctcaccacagttctgtccctgcaaggaaaattgttcaaatcaaaaaattcaaaagcacgaatgggctcctggtttgatgaagtttatgacaaaagataagggatggggagtcaaaacgaaatacggtatcaagaaggatgattttattcttgaatatgttggggaagttgtctctgaacgggaatttaaagcaagaatggcatctcgctaccaaaatgatactcatcattattgtctgaatcttgattcaggtcttgttatcgatgggcatagaatgggaggagaaggccgattcgtgaaccactcgtgcgaacccaactgtgaaatgcaaaagtggtgtgtaaatggtttgtttagaatggctctttttgcgcttcgtgacatagacgcaaacgaagaactctcttatgactacaactttgctctgtttaatccagccgaaggacagccatgtaagtgtggttcttcaaagtgtcgtggtgtaattggtggaaaatggcaacgtgtcgctgtacagagatctggcacaccatctgtgtctgtgtcggtagtcactgaagagaataaacaacctggtcaagtcggacgccctaggaaaaacagcaataggagaaagacgactgttatcgacaagaaacaaaccaagcctactaaagatactaaggcttcttcaaaggaatcttgcagcggggctaacgctttagctacagtcgcagcgaggttaaatcacttaactccagtaaaacctttatctcatcaacagaaaacttttgtcagtgcccacagatgcttcttgatcaggaacttagaaaaggttagagttttgcgtgaacggctaaaacaagtcgtgaaaggaggagttgcgccaagtgttgtcgctccgagccctgcagctcctcctcagcaacaagttttcctgactcagctgacggctctttcttgccctcgttctatcagaacaaggcggctggctcaagctcaagagaatccggagatgaccaaaactgctcgcttggcctgtatattcaagaatctctacactgaagtggtcaatgctaaagatgagaaaggggaatctctatcgacaccttttatgaacctaccttcgaagaaaaaatgtgccgattattatacaaggattcagaatcctcttgatcttacaatgatagaatcaaatatcacaacgggtgtttataaaactgtcgaatccttcgatgacgacatgatgacggtgttcaagaacgctgtacgatggcatggcaggacgacagatctaggcatcgctgctgcgaggttgagaaaaatctacaatcttgctaaacttggcattttagaaagtatcgaggaaatacttggaacatcacctcctccttctttcattcccccgaaacaagatcctggagcagaagaagaggatgtaattcgatgtatttgcggcctgttcagagacgaaggtgtaatgatacaatgtgagcgatgtctagtttggcagcattcctggtgtgtgcgagcgaacacctctgctgacgaatatttgtgcgagaggtgctcaccacggtctgtgggtctggaagtgccagcccagcccgaacatcaggacaataattccgatcaagttaattatattactcttctgagaggggaacttcagctcaagcagggtgatactgtttacgtcttacgggacattgtcaatgaagaaagtaaaactgttcctaaagaaaaacatacatataagaccataaagaattggaaatatactgattgtgatatattccgaatcgaaaggctatggaaggacagcaaaggagacaggtttgctttcggccatcattacctgagaccgcacgaaactttccacgagccgacgagaaggttcttccctaatgaactcatgagagtacctctgtacgaggtcgtacccgtcgacttggtcatggggcactgtacagtacttgatctcaacacctattgcaaaggcaggccgatcggatcttctcctcagcatacttacatttgtgaatatcgtgtcgacaaaaatgccaggatatttgccaaaattccgaagcccaagtcgtcgaatatctgtactaagagctacgccttcgaaacttatgatgtgagactgaaacctcaaaggaactatgctcctcatgggctggtgaaaggtgttaatctcaatcgtgggcgtggatgcaaaagtgccaacaatgaagaggctagtgcgtcgacccttcctcaactacctgaagaatctccacaagaagaagaccctgtagctaagagagagaagcagaagatgcgattgaacggtttcctcctgaagctgctggccaggcttccgtctaaagcccccttggacctctcctaccttctcgagcctggccgtaggcagcggaagaagcctccgttgttggcgtcatgagattggcttctcctataacacgttgttaccacccaatgcagttaattaaaacttaaaaatgtacatatttaaacactatgtaatctccttcccagtgaactccactttttttttttttaattgtttcattgtaattagtatttattgatatgtatattgtacataaaaaaagaaaaaacaaaaaaagaggagaaaagttgttgatatttataaggtacaaatcatttgtgtcatgttttatatatttattattattttgtaggtatttttcttaattaagattatgagtgtttcatgtaattatttttaatttggtcaaaccaatattattataatgttgatcatagagcaacaaattgtacatattgtattgctaatttctttcttcgagcttaaatgttttagttctgttattaattctcttgtagataaaaatgttgctttcagtgtcttccgaaagcattatgagaattattgattattaaatattaaaaaag

SEQ ID NO: 372 - DNA, 1353 bp, Nezara viridula
gaagcagcgttgggacaacaatcttcaatttacctaccccataaatcaaagcccttaggtccggatgaggttttagaggctgatcccagtgtatatgagatgctccacaatgtcaatgtatcctggccctgcttgacaatcgatatcctccctgatgctctcggcacagagcgtaggtcttatcctgcatccgtataccttgccactgccactcaggcatccaaggcaaaggacaatcaattgatcgccatgaaattatcgtcattatcgaagacattggtcaaggacgataacgatgatgaggaggacgaagatgatgatgatgatgacagtgagggaaatcctgtgatggactcggaatgtgtaccccttaaaaatactaccaatcgactcagaatcctgccgcacgctggtgaaaccggcgagtatttgacagcactcatgtctgagctgggggatgctttaatttatgatttgactagcacttacaaagcgtttgacacaccagggttcattattcccaaggcagcaaagcgtccggtccacacaatccgagcccacggcaacgtcgagggatatggcttggactggctgccactaataaatactggtcttttgttgacgggagacgttagcggccgtatacatttgaccacgcgtacccctaccggttggaacactgagaatcaaccattcacagtctcgcaagcatccatcgaagatatccagtggtccactggagagaccacagtattcgctactgcagcatgtgatggctacgttcgtatctgggacacgagatctaagaagcggcgtccggccatttccgttaaggcgtcgctgagcgacataaatgttattctgtggtccgataaaatcaatcatcttctagcctctggccatgacgacggctcatggggtgtgtgggatttgcgcagctttggctctggccccgctccatcccccgtagctcattacgatttccacaaggccccagtgacctctatatcttttaatcccttggacgagtctatcatcgccgtttcatccgaagacaacacggttacgctatgggatttggcagttgaggctgatgacgaagaaatcacgcaacaaaaacgagacatggccgaactccacgatattccacctcagttgctctttgtccactggcaacgtcatgtcaaggacgtccgctggcacaaacagatcccaggatgcttggtatcgactggcggtgatggtttgaatgtatggaagacaatttcagtataagttgaggcaaatcgttctgcgcaaccaagctatggttgaagaatgcactgtgaaggtaaacttttttatggagaatcg

SEQ ID NO: 373 - DNA, 870 bp, Nezara viridula
tgaggcagtacttcggcatgttcggcacagtcactgatgtcctcatcatgaaagatcccatcactcaaagaagcagaggatttggattcatcacattcgctgaagcagacacagttgagaaagtcctcaaggttccgattcacactctcgatggaaagaaaattgatcctaaacatgcaacaccgaaaaatagaccaaaagccaccaacaagactaaaaaaatatttgttggcggtgtaagtcaagacacatcatcagatgaagtaaaagcttacttctctcagtttggtaaagtggaagagactgtaatgttgatggatcaacaaacaaagaggcacaggggatttggatttgtgacatttgagagtgaggatgttgttgataggatttgtgaaattcattttcatctaattaagaataagaaggtagaatgtaagaaggcacagccaaaagaggctgttgcagcagcgggtcttttgcgggtgatgatgggacccttgggagtacggatggcagcaccagcaccagtgcccactgggccattggtgagtgtgacggcagcagcagttgctgcccagcaggctgtagcgggctatagtaagctctttggtggctaccctggtctcgcttcttaccgctatgctccttaccctgtcgcagcacctgctacgcctacacctgcagcccctatgtctagtttccagggtgtcgattggggttcaatgtacggtatgggcatgtacgtctaactcgggtaaatgtataaaatcccatcgttatcattttactatcgatctacccttatctattgacagcttttttgctcacaccttttgggcccttcactagcaataatttgcaataagcgac

SEQ ID NO: 374 - DNA, 894 bp, Nezara viridula
tgagaaactgaggcagtacttcggcatgttcggcacagtcactgatgtcctcatcatgaaagatcccatcactcaaagaagcagaggatttggattcatcacattcgctgaagcagacacagttgagaaagtcctcaaggttccgattcacactctcgatggaaagaaaattgatcctaaacatgcaacaccgaaaaatagaccaaaagccaccaacaagactaaaaaaatatttgttggcggtgtaagtcaagacacatcatcagatgaagtaaaagcttacttctctcagtttggtaaagtggaagagactgtaatgttgatggatcaacaaacaaagaggcacaggggatttggatttgtgacatttgagagtgaggatgttgttgataggatttgtgaaattcattttcatctaattaagaataagaaggtagaatgtaagaaggcacagccaaaagaggctgttgcagcagcgggtcttttgctcggtaagcgggtgatgatgggacccttgggagtacggatggcagcaccagcaccagtgcccactgggccattggtgagtgtgacggcagcagcagttgctgcccagcaggctgtagcgggctatagtaagctctttggtggctaccctggtctcgcttcttaccgctatgctccttaccctgtcgcagcacctgctacgcctacacctgcagcccctgctcctcctaccctcactccggcctcgccgtggggttcaatgtacggtatgggccatgtacgtctaactcgggtaaatgtataaaatcccatcgttatcattttactatcgatctacccttatctattgacagcttttttgctcacaccttttgggcccttcactagcaataatttgcaataagcgac

SEQ ID NO: 375 - DNA, 954 bp, Nezara viridula
gtttatctgtgtatcatattgttacaggcattttgttatagttattgttatagctttacaacatgtttttcgtagataattacagtcatccgatccctaatgtcaattacattaaggagtcaatccttggtcctggtggagatagagatgcattctactcctggtttgaaataacttgtccttgtttcgaggaagcagattgtacgagtaaatgtgaatgtataaggaggtttggccaaaattattataatggcttattaataccagataaattaaacaacgaaaaatgcgtctatgaatgtagtgccttttgttcatgtggagatatgtgtcacaatagagttgcccagagaggaccaaatgcctatttggaaataaggaatgctggtgaaaaaggtttcggtgtctttgctttgaaaaccttttttgcgggtacattcattgcagaatatgcaggtgaaattatcagcaaacaggttgcagaggaaagatataatttagagggtaaaaacaaatatattttggcattgaaggaacattattcagaaaatgttgttgaaacttatctcgattcctacttgtatgggaatatatctcgttttatcaaccactcgtgctctcctaactgtgttgttataccattaagaactggatgtgtaattcctaaagcagcaatattctctaacagattgattgaaaaaaatgaagagattacctatgcttatcaggacagcacaactttgagtgactcaaaatgcctttgcaaatcatccaattgcaaaggtttcttacctgccaacattatttgatgactgaccacgtgtggtcttttatcaaacatttctttttataaattgtacttctttcttattattaaagtcataaaatgtatcattattttttatatcataaaaatttatagaatttgatgaattatgtttattgctagttgcg

SEQ ID NO: 376 - DNA, 4395 bp, Nezara viridula
cctaaaccggtccctctactcattctttgtccgaacttgcagtttacgttagggtgtcctctccaacgtttcgatatttgatgatttcgtttcggcgcaaaaataaagtacttggaagtaataactgccttaaaaataacattcctcggagcaaaggtagcgaacgattatttaaaatgttattatagatgtttttaaacaaactgttttatgagtgttataagtgtgttgaacggtaatggccagtttgaagttcaggttatgtcagtgtactgctagatggtcgcgttgagtagtgaagtggcccctacacaatatttcgccgggattagttctgtgattccctgaagtctgtttgaacagttttgttcgccgtatcaggttggctacgttactattttcaatgtaacacatcctatacaatattttttgcttatctgtttggcaggttatttcaataatattcaaagtgctatttgtggattactgtaaatatatgaatattaacaaggtgttttgttttcttctttgattagtcatacagttttttcagtgtgttgtaacctgaaagtttgttaagtaccaacatttaagtcatattttttagactggttattctgaatacaatcaaggtgcaaatagttgatcatttttaggttgaatcttttgagttacttgcttaacaccttgtcaacagaaagcccactcaatgggccctagaaatccaggatttcatctaatcctgattctggtatcttgcccagttattcatggaacactatataaaaaatggattaacttaaatgaaatcaaggatttgtttgatgaaaatggatgtgtaacaggccatttaagtatggcaggaagtgcgccagtgcctgtgggtactgacaacgaaggctcttctgctggtggccagtccagtcaggatgagcctgccacgactgacggcagccaatctgttttagggaaagaaaagactcctatgtgccttgtcaatgagttggcgaggtataacaagattgaacatcaataccgcctgacgagtgaagacggtccaccccataagaagaagtttactgttacattaaagctcggtaatgaggagtacactgcagagggcgccagtatcaaaaaggcacagcatgcggctgctggcatcgccctcaagagtactacctataaacacccgccacctaaatcttctaggcaatctagaggttcaaaaagtaacattaccccaactgtggaattaaacgctttggcaatgaaaaggggagaaccgacggtatataccctcgttgaatctcctcaattccaccagtacacgtaccaccactcccacagggggatgtatactcagccctacaacgaccatttctcattcccttacggaagaggaaaacctaatttcagaggcggatttaatcgtgttgatccaaggttctatggtccaggaaataaagcacctctgtataaggttgtggtaaaggtcggagaacgtgagttttctggcgaagggaactcagcacaagccgcacggcatgacgccgcttctaaagcacttcagttactgcacagtttacccgttgatgacacttgccctgccaattctactatctgtggatcagaagaaggtggtggactgactgagcaggagtcggaacttaagtcaccaatttcgttagttcacgagatagctttaaagaggaatcttcccgttcttttcgaagttatctctgaaaaaggtcaaccccatatgaaaacttttgtaacgaggtgttgtgttggcgataagtttgaaacgactggtgaaggaaatggaaaaaagatttcgaaaaaacgagcagctgaaaagatgcttgagcagcttaggaccctcccaccgacgacaaccgtcacagctcctggttgtgcatcagcgctcgctcgtgcgaaacgtaaagctactactgggaaaaagaaatctagaaatattattaaggaaactcctgtttctcaggaaacaaaatacgatgaacgtgataatagtgatgaaatgaatcctatttcacgtttgatccaaattcaacaggctaagaaagaacgagaacctgtttatactttacgggaagaacgtggccttcctaggagaagagagttcattatggaagtgactgtggggaaacattcgtatatcggatcgggacctaataagaaagtagccaaacgaaatgctgctgaaggccttcttcagcaacttggttacgccagcccgacgttgagcaggagtggtcatcctcttcctcaaagtcagccacagcagtcccagtcgcagccttcgcagcagcagcacaaagtaagatttagtgatgaaaaaccggaaggcggggtttcgggccgacagcttgtacctggtcttatccttatgaaggacaacaaagccacaaataatggacacaaaccaggcacaggtgtcaacttgaaagccaccattgccaaagagtatttaagtgagggttcttcgcctacagctgatgcacttgctggagtgaaacgccaaaccaaaaattcatctgtaaggcctactgaacagctggcttacttagcttctgtactgaatttccaagttcaattttcggatttccccaagggcaatcatagcgaatttttaactctagtctctctcgacacagatccaccacaagtctgccatggagcaggagcaacaatagatctttcccatgaacaggctgctttaaatgctcttagatctctttctaaggtaggtcttgattcgatcacgcctgcaaagaaggaagccacaactacaccccagccagtaccaaaacctgaacctgggctgtttattgatctcaaagaggaaacaccttatgttaatgggaagtgaaagatacgttttattttaatattgtaaaaaaagaaaaaaagattcctttagttttaaatgtttatttaacacaaaaatttatttaaatacgttattaataaatgataatacaataaatatcagagagatctgacatcaatatttcgattactgtgaattaattattgctggtcatatttttttattattattgttattttgttttagttattattattttttttttttgtaatattttgtaaatgaatatgactgatgaaaagaaaaacataaatacaggccacttatagcattgaaacggtttcaatctgttgtagattctgatatgtttattaattattatgggaaatatagatgaaaaagtttattattagtactaaaccgagtgttacaagtgggcctcgatttaatttttttttttaaatatgtaatgtttcgccagttttgtcgaaatagtcgctatttatatatttcatcgcagtctctaaatgcacttataacatcatcttctttagcgacgcattttaaggtataatttataaaaaaagttgcgatatgcagcttaaagtattatgataaaaacaattaatgaaaagagaaaaaaaaagtagggttttattagatattaggacgtatttgttaacactattactctttcttattgcaagcagcagttaatgtgtatgtaagttttcgtttttttatatattgtattataatataaatatatataagtgtatttactaagataaccaaataaaaagtttatcaagcttacataaacattatcaatgctgtaggaacgcagaaaaaaaaaaaaaatacatacactttttagatttaggtccctgaaatattgaaagaatttttttgttaattctctatgtttgtcctttctataatccttattagtgcatatggttggtgttagtttctctgtatattatatattatataaatatagatatgtatgattatatttcatttttggctaatttttttgaaaaaaaaaaattcttgttatattcaggatatgcatgatgtaagaacatgttttgcctttttttaaattaaaaaaagtattttcttttactcttttaagagcgtttgcgttttgcttgattacattgtaatggacttgagctaaacgctctgtcgctcgtttattttcttttatatgtctaatcacagagtgttttgtcttttttttttcactttcctgatatttgtatatcattacaatactcagtgtatactttgttataaacgaaagatgttttgggtgttaatcaatacattagttagaagcattgtgttttaggtgcattgagacatattgctatggtgtgtgatttattaattatagttatattatagatatgtatacaatttttagaaattgttatcgacgagagaaataaaaaaaatatagaaggaaaaaattttagttgtcatattgtaatattgttcttctaaagaaattatcaataaatcaccaaccaaaa

SEQ ID NO: 377 - DNA, 3397 bp, Nezara viridula
gttgagacgggaaacccgcacgacactgggagtacctcggtcgcattcacagtcgtcaagatttcggtcgaggggtcgtcgggtgcccccttcattgtggggtacaacttggtaggggtatatccgtgcgctgtctggaagcctgcacagtctcctcagtgctcctgtacaggtgcagtgcgaagcagccgctcggcctcagtgagagcagtgccgtacccgcagtgtcgccgttgccgggagcacagcccctcatgtgaaggcacctccagctcgcagccgccagccgctagtccaatgctcttcgtcccgttttcagttcccgcccacctcccgctccagccccagcaggtcagccccagtcccgcgtctacgccaatcattaaggaaatgaaggtgaattgggcgacatcaccgggtcctcagcccaagcaggacacaagcaaacactaccacatatttgtcggcgacttgagtccagaaatagaaacgcagacattgagggaagcattcgctgctttcggtgaaatttcagactgcagggtggtgagagacccacagaccttcaaatcaaagggatatggcttcgtatcttttgtcaagaaagccgaggctgaaagtgccatcactgctatgaacggccagtggcttggcagcagaagcatcaggacaaattgggcaactcgcaaaccacctggcccgaaatcggatgcaaacgccaagccattgacgttcgatgaggtgtacaaccagtcgagcccgacgaactgcacagtctattgcggagggctcacgaacggattgacggaggaactcatgcagaagaccttcgctccttatggaactatccaagaaattagagtcttcaaggacaaaggatacgcttttataaggttttcgacgaaagagtcagcaacgcacgctattgttgcagtccacaacaccgatataaacagtcatcctgtcaaatgcagttggggcaaggaatctggagacccaaataacagtcaacaaacgggacaggactcatcttcagttttgatatcctccgatcctctgttccagccactgacgggaggtcagttcccgtacgcctacggccagcagctgggctattggtatccccagtcttacccccctgccgccactcagatgcaaggccagttcttgcagggtatgcaagggtacgcttatggccagttcggctaccagcaaggatatatgagccggatgggaatgcaactgccaggcgcggcttggacccagccccagctgccggcccagcagatcgcttcagcagccgcactccagcagccgactccagcgggcatgatggcagcatacccggccatgcagcagttccagatggccgatgaagagtggcttgcaccaagcctcctcgtctgatggtagagctgcaacacctgcccgcatccaccactgacttcactttcttgagcctgttcttttttttatttccctgtcgagcgtggtctgttatccaacaccctatcatcgaacctctggtcccgccctcattgaaagatatactcagctaatgttttctctgttttttgcctggaaaaaaagacttttgttggggacaggaaaagaggaaaatcatatagctcagcccaaccacgatcttaactgtatcaatgatataattttatttaaataaaaacaacaaaaaaaaacaaacaaaaaaatcagtattatatgtgtgtctgttttatgggagtacatttttgagtattctgtatctgtattttagggaatatatttggtatgaaaaatatttttaaacaaaaaaaaaaaagtcaaaaatggatgggaaaatctgtgagtcgttgggcactctcccacaatcctttccgtttgtataaagtcccttccctcgtccctcagccctggcaaaggctccgaaaattttaaccaatgctgtgtgcgtgactcatatatctttgtataaagcaagtacaggcttatttctttatgcagatctgtaaaagctggggtgtatattttattgtaagtggatgtatgtaaatatatgaatgtctcattcatttatattgacaaaaaacaaaaacaaaaaaaaattaacaaggtgatatccaaagatcgaaatagatcaataaaaattgtagagtcgcagatggtaaatagtgttttgtagttttagatatatgtagtgttaatataagagtatatatatatatataaatatataaataaaatatatatatataaaatgaacagaaaagtgaaaactagtgttaggagcgagtatataattaaaaattaaaatacagtgcagataggacatttttaaatttgcgcagggatactcacattgccgccgccttcccggccttagaagggtgggatagtagattaattttttagtatttattttgtaggcaggggaggtggtgtggtcagtatccctagaggcctgaggcctgtcaattgtagagccaggttctttttgtacataatcagcgtgctaacttgggggggatttgttaccttgtggagggagcatctctccgctggggacatctttttcacagaaaaaaaaaaaactacatgtttaaaagtaacaattatttgctatcagtagggatattttatatggaagcaaaaattatatataataaatatatatataaatatataaacggggcgttttcaaggcaggttgataaatttcggaacagaaagtagctgtaaatatcgtttagctgtcgttttggccggtgagttttgtttacgtttgtcgatttaccagagtgcactgccaggtagacagagagaggatcttgttagagttttaaaacaatggtggcataataataatgatgtttaattataaagaaacaaaaaaaaaagtaaaacaaaaaaaaaagaaaaacttagttggaccgtactgtagagagcgcacgtatagttgaaaacatgcacaaattggtacccctccttaacccagtcctgacccttcgttagaatattgccaggacagaagggctcttttgtgtaaattcaaattgtcattgcgaccctgtgtaaagcggctttgggaaagagctggattgatgagtagtagccttcgagccaaagagaatattttaaaataaatgtttttattttcccaaggccagctcaattgtgaaaagccctgttgtataattaaaaatatgttttatacaatgctttggcaaacaaaaatgtttgatatatatatgtatatatatataagtatatatacatatatgttatatatatgtattatatatatatgaacactttatggccgaaaaaaaagaaatgtaataaataaaataaacgggaatgtgtatataataaaagttaaatgagtgtgtttatttacccc

SEQ ID NO: 378 - DNA, 2457 bp, Nezara viridula
gtcaatagttatgtcattgaagttttgttttatttacccagtttgctacacatttgaggaagatcatgattttggtgacaatcagaacattatttttattttcattagtaatcatacctaattaagagtcagagcataatcatgttaatattcataatatttttgtttatattttccacttatatgttgggatggaataaagagaacaatactgaaacaaaagagggtaaaaaagatcttaaaccagagaaaaaaaatgttattccaactaattcaaaagaaaatgttggtactgttgcaactcctaccaagacaatagatggtgaaaaaaaaaagtaaagaacttgctcaagataaaaaaaaccagcaaccgcaccaggacccttcaaaaaggcggcaaaagcgaaaattaaaagatgaaactcccagaactgcttcgttacctttcatatacgtcaataaccttgtcagtttcgatcaacaagtgattaattttgttatgcaagtagaacaaactcagaatgaatgggccaacattaagtgggttttacaagatgttgaatttacatttggacatgtaatacctggtgttaagccggttctatatggttcttctttttctggacttgcttttaaaacgagtgatattgacgtgtatctttatgatatgagaggaggagaaccagaccgaggatttatacaacgagatggtgggataatctatcggtttaggttatttactaatattatacgtatacctaatgccagggttccagttattaaagctacacatataggaacaggaatagaccttgatataagcgcaacttctggacaagctgttgccaatagtcgcatgattcgttttcttctcagtcatgattggagaataagaagtcttatgatgttaataggttatttaggtaaaaagtatacacttattggagtaaataaattttctagatactccataaatctcctaatcatattttatctacagaatttgacatctccgattctgccacccttaagtcaaattgtttatgggacaccgggtagaacatggccatttgcatttaatgaaaatgttttttttattaatgaacattaataaacaaccattagccgaactttttataggattttttgaattctttgttgattttaccttttcaaaatatgttatatcaacatatttaggagaaaaaattgctcaggaagatatggaaaaggaggaaactttagataaaatggtttattataaaaattttattgaaaagggaggtgataaaatagtatatagaagtatttgcgttcaagatccactggaacttagtcataatacaactaaaggtattactgaaaaagtgctttctcaatttaaatttatctgtactaatgctcttcaaattaaacagacagctgatgaaggggattggctcatcgaaatgttaaaaatggaatacatccctcctgtggtaggaaaagttggaaataatctcacaccgttagatgttaaatttgattttgagggcgaaaattggatttctattgctaagcagtctttacagttggtattttcttctttgggaatggatattgactggagttatccggttgtagaagatgataaaaaaaaaacaaagctctcacctggtttgacgttttctgtcgaaacaagaaattttatttttcctaaagggcttaaatggtctttaaagcagctcaaagaaggtaattacaatttaaatgacctgaaaaaatctctaaaggaaatttctgaaaccaaacatcaaacggtattttgtgctcaatgttttgtttcacttgaccagcctaagttacttagaataactatgaaaaacaattgcacccatcgaatgttctttacaatgtttcccattttaagaagtgctttagaagtgttgctgaatcatgctttacttgaaatcaacaaaacttcaagtgatttgaaattgacagagtgaagattgaatttgtccgaaagtttcaattgggctccaaccagcttgaataattatcttatgtaaaatctggaatgtctaatatacttcagaaatctatactatttacttgaaataccatatactcatggttttacttgaactaccaaacttggtaaaattaaaaatgaaagacctttttggagtttgtcttgcaagaggcaaatgacaaaccttccattgattgtaatttattgacctcagtgaaacatttaggctgtgataaataatagtttcaataactttgttaataaattttaattatttgtagtatacttcatgtatatttttttgtgtttgaacgtactgtatatgttatatatcctaagtctagtatataagtgcgtactgatgtttatgaggtagtaatttattgacattttaattcaaaattattgttagacttggatattatctataaattgaataattt

SEQ ID NO: 379 - DNA, 727 bp, Nezara viridula
ggggactgtgcgaatgtttctgctgagagcaaattctggctgctagttagccgtggggtttgtaatcgtatactagtttgtttactcgcgggttatactcttctcctctcttcatatatctgacaattttgaacgtatattgtgtttccccagaggtagatgaagtttttactatgtcacggatgcaaaaaaaggaagtggaaaatgttaatcctagacgaaagcatacaattatgtcatccgaagaggcaggaagtgggaaaaagtctaattggactgaaatggagataacaggtactattcgtaatctgagctcacgtttgtgggattggactcatttgaccagtttgtacctgaatgacaattgtctgagtcggctacctccagacattggaaaacttgtcaatcttcgtgtacttgatttgtcttgtaataaacttcgttccctaccagctgaacttggggaactcatctacctcagggaactgttattgaataacaatttgttacgttctcttccttatgagttgggaaagctgttccagctgcaaattcttgggctggccggaaatcccctttcgaaggaatgtctcaagatgtacaacgagcctaatgggaccagcaagctgattacttatctactagacagcttacaagtgcgagcacctcaaccaccagaaagaccttggataccattagctaggccgtccacgactaaaccttcttg

SEQ ID NO: 380 - DNA, 659 bp, Nezara viridula
ggggctataatgtactctgcgataaatatgcaacaaggcagatgtacggctattgtccaacctgggcccttgcctgggaatataggaagaaagcaatcctagcagaaataagacattatacagctgacatcatcagtttacaggaggttgagactgatcaattttacaaattctttttacctgaattaaaaagggatggttatgatggtatcttttcaccaaaatcaagagccaaaacaatggcagggagtgaaagaaaatatgttgacggctgtgccatattctaccgcactgccaaatttacactgatctctgaacatttggtagaatttaatcagcttgcaatggctaactcagaaggctctgatgacatgctgaacagggtcatgccaaaagacaacattggcctcgcggcattgcttcggaccaaagaagctgcatgggaaaatcttgttgctggaagggactacagcaatatcaccgaacaggtcctgctggtatgcacagctcacatccactgggatccggagttctgtgatgtgaaactaattcaagtgatgatgctttctcatgcattaaagggggtccttgaggaagcttcggttcaccttcgcccaaataactctcccgtccagctccttctctgtggtgatttcaac

SEQ ID NO: 381 - DNA, 3521 bp, Nezara viridula
tgttgagatatctaactcacaaattgaatctctaccatcttgaatttagtttaatttcttgtaatgaacaacggcctaggtaaaggagatttttcaaggtctctttttttccagtaaaatatattatatcaacttatgcattcacgttaatttattgtttatcttatttgcttggcaacattgttgattctgagttcgtaaaatgtggcttgtgtttaggtattaacatggcggacaaagttttaaaacatatcccggagcaaaagctcaaagctttttcaattggaacaatgggaaaaagacagccatccaagaaggaaattgaggaacagaagaaaaaggaacaagaaaaagctgcggcacaagcttttgaagaatttgttgcaacattccaagagccagcaaacaaaacaagtaaagtctgggtgaaagcaggaacttatgatgctggaaaaagacaggaagatactaaagagaagggtaaattgtacaaacctcaatcaaggcttgatgtccctgtggaaaaaaattcagcagaaaaagcgcaggagtatgcaaggctgcttggtgagagaatgaaacctgaaagacctggaaagaaaaaggaaaaagaaaaaaagaagagtaatttagagttgtttaaagaagaacttaaaatgattcaggaagagagagaggaaagacataaatacaaaggtgtagttaaaacagcagcccttattgaccctgaagtaatcaaagcaactggtgtcatgcctgatgaaaaaggttcttttgatagtggggatccaaatactacaaatatctacttaggaaatattaatcccaaaattactgaacaacaattgatggaagtttttggcaaatatggtccccttgctagcattaaaattatgtggccccgctcagatgaagaaaagctgagagggcgaaactgtggatttgttgcatttatgaatcgaaaagatggtgatagagctatgaaagctttgaatggcaaagacatccttggatacgaaatgaagctggggtggggcaaaggcgtacctatccctccatttcctatctatattccacctaccctcctgtcattggctcagccacctcctccatctgggctcccattcaatgcccaaccccacccaaaggatagaaataagatcccgagaatgagaccaaatgaaccctaccctatgaatccggaggacatggagaaagtagagaagattttacctcaggcactcgtgaaagtggttatgccgactgacaggaatctcctcatgctgattcaccacatgattgagtatgtaatccgggaagggccgatgttcgaggcgatgatcatgaacaaagaaatcagtaatcccatgttcaggtttttgttcgacaatcaatcacctgctcatacttattaccgctggaaattattctccctgctccaaggcgattcgcaaaaggaatggtgcctgaaagagttcaggatgttcaaaggtggttcaatatggcgacctccaccaatgaacatgtatacgcagggaatgcccgaagaactgatagagagggatgaagagagaaaaggtggcctctcaccagctcagagagatcgccttgagcagctcattcgtcacatgacaccagaacggttaaaagttgcggatgccatggttttttgtattgagcatgccgaagccgctgatgagatctgcgactgtatcctggaatctctttccaataacaccactcttctgtacaagaagatagcaagactttaccttgtatctgacatattgcataattgtagtatcaaaatgactaatgcttcaaactatcgaagatgcttagagtcaagattagttgacatattcgaacaagcccatcaaacatttattggattagaatctcgattgaaagctgaaagttataaacttcgagttcttcaaatttttagagcttgggacgattgggcagtttatccaagagattatcttcttaggttaaaatccactttcttaggagcccagattgaagaagtagaagaggaagaagaaagggttgtcactccagagattcctccacctgatgatattgtcaattcagatctagacggcgtacctctagacggagcagccctactcaaaggagcttatggccacgcctatgatgatattgatggagttccaatggatgatgacttggatggcaaaccttttgaggaagatctgcatcggctgccgtcttcccgtagacctgaaggtgcatttgtcccttcgaggtgggaagaggtggatccggatctaattgaggaacaagcgatgacaacttctaagtgggagctgctagaagagagcaaagttcaacgggaaccgatgccaccgagccaaacaggcagtggcgatgaatctcaacctgtccctcctcttccgagggaaccatctccagcctccaatgacagtagcagagatggacaggaagaagccaggagagctaaactaagagagattgaggttaaagtggtgcagtaccaagatgagttagaatcaggcaaacgtcaggttaaggctggctggaccataccagatcagattgagcatcaccgaagaaaactacttcgcaaggctgagaaagctgaaaataaagaaactactactcctaataaaccagcggataaagtgaaaggtcgtagtatatcaccggatgattctacatctgattcaagatataagaggtcaaagcgatcaaaaagcagtactcctagccctcctccttctaagagatcaacctacagatcaagaagtcggtcgccttattcttcatcaagacgacgaagatcccgttctcctcgcaggcgagaggacagcccacccagaaggaggaggtcacgtagccctgacacttcttcgccagcacacaagagacggcactcttcatcaaggcataaacacaagcacaggcactagggtggggcgcaaaaaagaaatgtcagtgctgccaatagccattagtcgttgttttattttcctattacagtatattgatgtatatgtgtcgccaagtgttacagcgtactgaaactgtgtattatttgtaagttgttaatttatgtacatataaattatgtaatgaatgatattagtgactaagatgattgattttgtgcatatattgtgggaaattcttgtgtttgtcccggtgtacataatatgagggatgtttgtggcagtagaggccaatactcattcctgtttttattaaatgtattaaagtcatttgtacaaagattataataaccattagtctttttcttttttttttctttttctttggtagactttttagtaaattattttattgtttatttacatatgattgtgacgaaacagaatggaatgttacttgttgattatgtacctgtttcttaagattacttgcatatgtgcatacattttatcgaaataggtagaaaaaatgtatatttgaagtatgagaaaagaggaaatgtgtatgtatataggagtgtggaa

SEQ ID NO: 382 - DNA, 389 bp, Nezara viridula
ctcattggagtttgccgatgtcagtacgagcgtaagctttgactattcatttgaccgcatcttggacgactttattttgatcatgtatgtcattggcaacgatttcttgcccaacctccccgatcttttcatcaacaagggcgctttcccactcttaattgcgactttcaaacaagcactcaagctatgcgacggatatatcaacgaagggggccgtatcaacttgcctcgcttgggaatttggttgcgatacctttccgagtttgagatggaaaactttgagcgagaggacgttgatgtagaatggttcaataaaaaattggaaaacatttcaatcacaggcgagaaaaagcgggtacgggacggtaggcttcttgtgttgaaggcgg

SEQ ID NO: 383 - DNA, 766 bp, Nezara viridula
tgctctcaacctagaagaatatctgcagtatccgttgcagaaagagtagccactgagagaggagataaagttggccagtctgtaggctatcaaattaggcttgaaggaaaagtttctccttatacagtactcatgtattgtacaaatggtgttcttctacgtactctaatgacaggagagtcagttttggcaactgtaacacacattattgttgacgaagttcacgagagggacaggcttagtgactttgtgctaattgtactgctctagccaagttccgttcattgcgtttgatactcatgtcagcaacggcagattcaagcactctttcttcttatttcaataattgtcctgtgataactgttcctggaaaacttttcgaggttaaagaacaccatttagaagacattttgaaacagactggttacatgacctcagaaatggaaaagatgcgcaaagacctcgagaagaaaaaagctcaagcggctcagctagataagtgggctgaagcagtgagagacgatgcttcgatgacgtctagtgcgtctgctcaacttttagcctctaacagtactcagggccatgaggatgttgggacatgtaaggaaatggacgaagctattcaagaggcttgctgcctttgcgcagcttttatacttacttcaaaatgaagttgttaatgtggattatcagcattccaatacgggtataagttcactgatggtagcagccgctagaggctcggccgaggtaatcgaacagctgt

SEQ ID NO: 384 - DNA, 2225 bp, Nezara viridula
tcttttttatgagccttagcattggaaattattactcttgatgtagttaacttcaatgatttcaaaaagaacaagtataattaactattttgaactaaagaaattgtatatggaacactgataaatagaatactaagtagtttaaaacacgctcactgttgaattcaagatggaaatcgattcttaattacaaactatttttaaacatatttttttaaaaaagaagtagtctgcatttaaataattttatttacgtttaagattaaaaatcttagtaatttgagtttggttttcatttctgagcaatatattgcttgaatataatgtatgtagttcttcacaagctgttgtactaagcttccatattagtttctcgtggccaagcgttgctttggagaatctctgtatcgcagtaattcgctttgtgtaattataaatcatggctgataatgatgatctgttggattatgaagatgaagaacagacagagcaacctattgttgaaggttcaggagatacagctccccgcaaagatgtgaaaggagcttatgtatcgatacatagttctggttttagagatttccttttaaagcctgaaattttaagagcaatagttgattgcggctttgaacatccttctgaagtgcaacatgagtgtataccgcaagcagttcttggtatggatatactttgtcaagcgaagtctggaatgggtaaaacagctgtatttgtgttagctacccttcaacaaatggagttgactgaaaatcaagtaacagttttggttatgtgtcataccagagaattagcatttcaaataagcaaagaatacgaacgattttctaaatatatgccaaacatcaaggttgctgtattttttggtggtttacctatccagaaggatgaagaagtcttaaaaaataattgtcctcatattgtagttggtacaccaggacgtattttagctttagtgaagaataaaaaactaaatttgaaaaacctgaaacattttgtgctagatgaatgtgacaagatgcttgagcagttagacatgaggcgtgatgttcaagaaatttttaggaatacccctcatagtaaacaagttatgatgtttagtgccacactaagtaaagatataaggccagtttgtaagaaatttatgcaagatccgatggaagtgtatgttgatgatgaagcaaagctaaccctacacgggcttcagcaacactatgttaagctaaaagaaaatgaaaaaaacaagaaattatttgatttacttgacatcttagagtttaatcaggttgtaatatttgtaaaatcagttcagagatgtatggctttggctcaactgttatgtgaccagaatttcccagctgtagctattcatagagctatgagtcaagaagagagacttgctaagtaccaagaattcaaagacttccaaaagagaatacttgttgctaccaatttgtttggaagaggaatggatattgaaagagttaatattgtatttaactatgatatgcctgaagattcagacacttaccttcatagagtagcgagagcaggacgttttggaactaagggtctggcaatcacatttgctagtgatgaggcagatgctaaagttctaaataatgttcaagatagatttgatgttaatattactgagttacctgatgagattgacctttcatcttatattgatggacgataaccaataccatattgaggtatttccacttcagtgtattttattttacttaagattaattgtgcgtgtcagtgattttcaaggactcagttgtatgttgtatgctttcatttttgtaatagatcttctgaagaacagattatggttattcataaaataaattcatttttaatattgtaaacaaaatcaagaaatagattgtctagatcttatattccttttgtacattaatttttaactgttataaaagttatctttttagttaaaaataaatggtgataaagagaatgatgtctactttgaaatagttctaagaacagtgtagaaagttatttgtccttgaggtaattttgttccatgaacaatgtctttttataataaatatttttaatttaatcctgtaattactgatgtgttacacttttttcccttaactttttatttgatggttccagttatattttaaggtatatatgagtctttcagttgaccgaatgacgaactacaattt

SEQ ID NO: 385 - DNA, 2285 bp, Nezara viridula
gttaccttttaaaagccgtaagtcgataacttttcgtacagtatagataacgtttagtgtatagtatagattccacgtttttttcttaacattatatgtaaaattgattaatatatttcgacaaaaagaagtaggttataggttagagtaacagagcggcgacgtatagaatttacaagcgttgggcatgagctcgttcccttatggcagcgattcgtattaaagaaaacactgagtttatttctctagtacgggagcatcccgcgttgtgggatcttacccatcacttacacaatgacaaattagtttgtgatgcgctttgggaatacatcggatgcaaattcaagatcaacggcccatctgctaaatctcgttggaagaacctgcgggataactttcgaagagaactccgtagatctgcgattggcttgcgtggggctacagctgaagaatacaaatcatcatggcgttatttcgatagtatgttctttgttaaagatcagcttcgacagaataatataataagcccattagttatgtctagaacacataaccgagttgatggcaaagacgatccttcatgtagttttgcgcctaatggtgaagcagatgaagttgaaatcgtagaaactacccatgatgcatttgttaaggagtttccaaagccttcatattcaaaatcaacggcaactgctaaaacggaagaaggagacctgcaaaagcacatggctgaggctatgttagcttctattgatcctgatgttggttttctagcttctttgctacctcatatgaggtctgttaatgcagaaaagaaggctttgctaaaaaatcatctgttgcaagtggtgctacagtattctgataatgatgacattggtgataaagccacagatcatgatgagtctgatactgattcaagttcagaaaaagcagaaggctccatttcaggcaatacacataagagaaaattattggttcttcaagattcagttgccaaaaaatcagcagtagatggctcggttgtgattaaagtataatttacaaactatctttaatttttatgtattgttctaatttttatttacagtttgtttgttttttaagttatatgagaagttaaccaattgatctcatggtgtcaattgatttaatcaaccaattggttaatgaaaccaattgtttcaatacatttttaatttttgtttttaagtgagtacttacctgaatgccatcttcaattaccacggcactaattacatacgttttaaatatcatattttgagtagaatttttttttctacaaaaaactttaccataaattatacttttattgatgagggtattgcacctttgactgggagaattgtacaaggtgatattaacaagctattgtttgatataaaccatacaattaatatatttaaacataaatatttacaatgttagctatactaataatataataaatactggcctaaattctcctactcatttattatactttaactatgaaaaagtcaattcaaaattcataattactgagttttcaattatacctagaacaaacagaatccttaaacatttaacttatcagcttacataatttagtgttaacattaatataagtaaaactatccattaagtagtgatgtacctttgagatagtcagaaaatcaactccgttatgtgatcaaaggtatatcagttgaacttatattttatgccatactacagattgtaaatcaatcatttcaaaagtttttactatttatctgcaggagttcatgcttgtagtacatagttcttgtaggagtacacacttactaaaataacaaaagaaaacactattgaaaactcaacctgaaaaatacttttcattgatgaaattggattatcatttttcagtaaaatgttattagtaaaataggtactgcttacagaaatgttatgctctgaacagagaagcttttaaacaatattggtagataattgtttaaaagatacaatcaacaatcaaaggtacaattggtcaaatatgcaataccctcgctaacaaaggctttcttagtattttttttactattgaaatttaattatttgttaccttgtgaaattatgtcatgtaattatttccctacatgcctttcttaaacataagaccaatgtaaatgtatttggttaccaagtttgttgtaaataagacaaaaacgttattttttttctattaaaattatataattatatttacattaataaaatgacattattaagtttttcaaaaa

SEQ ID NO: 386 - DNA, 2084 bp, Nezara viridula
ttttttagtaagttgtttgtaatcagttaaggtgtttatttcatggaactcaaatcaaataaataaattacttcttaatacccaaacaaatttatttggtaattattatatatgacgcatagctggactttaatagaccaacctgttgatttacttacgctacatttcaagaaacatatcatatttgagttgttagtgcttaccaagtgaaaaaaattaatgttacagatgtttgcatgtaatgttggaagaagaaatacgttccgcttcagctaggggaaatctccaagatgtaacttctctactaaaaagaggggctaaagtagcaccagattctagtggtcgtacccctttacatctggctgctgctggaggtcatacagagatagtcgacgctcttgtcaattcaactaatgtaaatgccactgatgctgtgggaagaactgctttgcaaatcgctgcaacaggagggcatgtagatgtggtcaaagttcttctgaaacatggtgctaatgtcaattcgcatgataatttgcatggcaatacttcccttcatgaggctagctggcatgggtttagtcaaactgtgtctgctctagtggagtataaggccaacgctgatattaaaaattgtgctggttttgctccccttcacttgtgttgccaaaatggtcataatcaaagctgcagagaattacttcttggcggggctgatgctgatatccagaacaattatggggatacagcacttcatacaagtgcaaggtatggtcatgctggagtggcgagaattctaatcagtgcaaattgtagagtttctgatcaaaataagaatggggatactgcgttacatattgcagctgccatgggaaggaggaagttaactacaatacttcttgaagctggttgtgataaatctattagaaataagcaatatgaaactgcctgtgacatagctactagaaaagatttaaacgaaataattattattttacaaagtgtaaaatctcagaaaggaagtaaaaagaaaagtaagaagactagtgacacttctgattctgacaaaaaaagtaaagaaaacaaaaggatggatcatgacccgagagcatgtggtagctccgttcgctggtctccttatggttgccattactatccagacccaaatgcgttccctcagccaaagctggactctttacctggagagccattgagtaaaggggaacaatattatttggatttggctggaaatattcgtaagggacctgtgggcgtcggtctgacctgttattgtgccaactttctgagagatatggaagcaagattagaaaagaatcatgtggaactgaaacataagattaagaagacccggtataaattggaggaaagggtagagcgaacagaaggaattctagcagaattcctaagtgaagggaggaggttccggtcggccagtttagatcttcttagggattgtgatgtgacacctgatcttcctacacctgaccttagtcaaattgacgttgctcttcataaaaaagccaacaaacagaaaagtcatgaagagcggcttgaaagcaattcggatcgaaagcattctcactctcaaggtagtacaccacttccaaaagccaacaaaaagaaaagtcatgaagagctgcttgaaagcaattcagatcgaaagcattctcactctcaaggtagtacaccacttccatcgtgtgatacctttgatgaaaatgctattgaaaaaattagggacttgtctttggctgacatagacatagaaaaactcccttataggtcccgcactgctgtttacagtcccacctttacaggattatctggtcaagatgaagcagataacccacctaatattcaagcgcttaattatgtgccagaagttatagatattaagaccttaaataagggtattgaaaatgaaagccataatctgaaaaacccaaatgtattataaacactactcataaaaattgtaaagtattaatttattgagattatataatttattgtatttgtaacctaagctttaatttatgtttctataaaagtattttttgttttct

SEQ ID NO: 387 - DNA, 5485 bp, Nezara viridula
gcgttgtgtacagtccgcagggcggctccggtgtttgtgaacagtgagacagatcgaactaaaatattgtgattttgtgggtttttttgtgaaaactatttgtgaccattatctataggcgccgtgggatgataacattggatattggcgaatttacaagggtatggtgaggtagaaacctctacggatggcagcctcaactatgggcaggttcctactcttggcagccgcggtttgtctacccgccatcatcattgccgaacaagttgtgctgctagatacatcacgcgaagcaaccctgcaatggacaagttatccttacggacctcaagccaacacaccagggtgggtcgaggagagcttcaccaacttcgagaagggaataaactggcgctcttatgtcgtctgcgacgtggcctacaacaacgtcaacaactggctgtggacgccgttcgtcgagcgcggtaacgctaaccgcatctacatcgagatcaagttcaccatccgggattgttccctcttcccagggaacgcgctgtcctgcaaggagaccttctctctcctctactacgagttcgatgctgccaccagggagcccccgccttgggagccggagtcctacaagctcattggtcggattgcagccggagagggaaggttcaacactaatactgaggtgatcattaacacggaagtaaagtcgatccctgtgactaaaaaaggggtatacttcgccttcagggatcaaggagcctgcatctccctcctagccataaaggtatactacatcacttgccccgaggtgaccatcaacttcgccaagttcccgacgacgcccacaggtcgggaggtgaccttcatcgagcaggcgacgggtcggtgcgtggagaacgccgaagagatcgacaccccgacctacctctgcaagggtgatggcaagtggtacctcccagccggaggctgcaagtgcaagccaggatttgaggccgacattgagaagcagtcttgcagtgtgtgcccacctggaaagtacaagcacgctactggcgatgaccactgccaaccttgtcctccgcacagcaaggcaccggactacggattgtctgagtgtcggtgcaactcaggattctacaggtcgcctgaagatcccaagagcatgccttgcacacaacccccatctgctcctcagaaccttactgttagcttcatggatcagagcactgtcagtctttcatggacagctcctagctttcttggtggccgaactgatattacttacaggatacagtgcgacatctgtggccaggcagtcacctatagcccacctactgagagttttgatgagactaaagttaccatcagcggccttagcccagttactacttacaaatttcaagtatattcagtaaatggagtcagttcagtttctggcagcgatggagagtttgttgaaatcactgtaactacagaagcttcagtcacttctgccatggtacataatgttcgagtgacagctgtaaaagcttctgaagtatctcttgcttgggatcctccaatatcacctgacccagactcagaagttttagttgaaacttatgaggtacgctgtttctcaaaacaagataaggaagatatgaatgctacaagcaagctgactaaagagccaaaagctactattactgcacttaaacaacgtacggaatatgtgttccaagtcagagctaaaacaaaccatggctggggagaattcagtcaacctgttaccaagacaactggacaagttttaggaaccccctatattgtcgatgaagacaacatgcaagttcgtataattgctggagcaactgttgctgttgttgtacttcttgttataataattattatgactgtatttttcctcagaagtcgtggaaatgatgaatgcaataaaaaacaacccagtgactgtgatactttagaatatcgaaatggagaaggactagttgttacctacatgcactgcaatttggataaccctcccattgttaccacgcatacgaatggcatgacaactccactttttacacaagttggctcaactgcttctcgtacatacattgatccccatacatacgaagatcctaatcaggctgtcaaggaattcgcaagggaaatagatgcttcatatataaccatagaagctattattggtggaggagagtttggcgatgtttgcagaggtaaactaaaacttccacctgatggaagatcagaaatagatgttgccattaaaactttaaaaccaggctctgctgataaagcaagaaatgactttttgactgaagcctctataatggggcagtttgagcatcccaatgtcattttcttgcagggtgttgtaactaaaagtaatcctgtgatgataataaccgaatacatggagaatggctctctggatacatttctcagggctaatgacggcaaattccaaattgtacagctagttggaatgcttcgtggaatagcctctggtatgcaatacctatcagaaatgaattatgtccatcgagacttagcagctagaaatgttcttgtaaatgcccagcttgtctgcaaaattgctgactttggtcttagcagggaaattgaaagcacgaccgagggtgcttacactactagggggggcaaaattccagttagatggacagctccagaagctatagcttttaggaaattcacatcagcgtctgatgtttggtcttttggtatagtttgttgggaagtaatgtcttatggagagcggccatactggaactggagcaatcaagatgttataaaatccattgaaaagggttataggttacctgccccaatggactgtcccgaggccatttaccaactgatgcttgacaattggcagaaggagaggacacacaggcctacttttggatcaattgtgaaaacattagataaacttattaggtgtccggatacattgagaaaagtggcccaaaatagggctggtaatcctttggctcctgatgccccagacttgactcagttcatgaccgtctctgattggctagcttctatcaagatgtcgagatacttggaaaacttcgagagagcaggaatcacatcgatggagggtgttgtcaggttgaccgtgcaggagctgaccagtctaggaatcaccctcgtcggtcaccagaaaaagatcatgaacagtgtacaggccatgagggcacagatttcggccaatctttccgagggattccttgtatagtcccgttgtcctaggacattccacgtttactgtgataaatctttaagtatatatgataaaactacctatattaatatatatatttaggtttttaaaaagaaaatgataaggaaaactttctttttagttgtacttaataaaaaaaaaatattgaattatttatcatttgtaaattgcctcagagctagtttagtcaatttatttgttttgcaagatcaatctcttgcagagtggatcactgaaaattttgcggcctgtctttaacagacatttctgatcggcctcaataaattgtacaaagtataagtgattcagaacaactagagatatataaatatttatataatatgttaaatgtctgttaattgcatcgagtatatcgaaatatgaatagaaatctgaattaatgattggctatttaataaaaatcatagtagcaataattaattgatgttaagtgttttccacatttatctgttctaaaataataattaaatgttttagataaactaatccccatgtcagacatagttgtggtatgtactgttttccagcccccttatgaaaagatatttgattttattaagtagacgaaaatttatttaatttttcagaggttgacttattaccatcatgtagatttttaatgctttgagctagttaagagggaatgatgtatatatatacaataatttaaataaatatcatttcctttttttgttgtttttgttaattttgaaattcttgatattaagaagaaataattttgtttcctatcagcttattttaaactaaataatatgctgataaataaaaatgtatatttattgtatcaattgtacataacttattttgtttatacagtgtatacttaatcgaaaaaatttatttatataaggcaatgatgccgccgttgccaattcgagctaattgtaatattctttttctatggtaacatctgatatctatatttgtaagttttcaatcgttctaattaaatatttttggagaaaaaaaatgtacataaatttcttgtttatttaaatggtgttcttgtatagatgaagaaccgactttctttcctcaattaaaaacacaaaaagttgaaaaatgtgtttgaatttgttgaattagagttggttaataaaaatcagaatgggatgttaaattatagtttccaataaatattaccaaaattcacatgctgtaaaaatggtttcctatttttaaaaaatacaattattatagaaataataataataatcaagttcccttttagcttatagaaaaattgattttattatttttattgtttgttcctataaaatttacaatcaaacttcattatttattacatttaaaggaaatctatttttacattgtgtgactagtttttacattatgtaattatgttacctaattaggttttgaacttaaaattcaacattcctatttcttctaaccatactgattgtatgtcctgatcgactaaagctttgtacttcacgcacttgggtctatgtttctgttttttatataaaggagattgcattattttaaacagtatggctgaagtgtgtgttatgcattgatataaatatgtttattttagtgtacaattatatgcttagagaaatcagcatttaatatatactgtgttttgacattattaactgaaaattatttttacattaatgttatgtgtacattgataaagtgttttttgtacatatttatacctcatattatatgaattaacacttttccatttggagtacttaaatatattgatgtattcttaaatagagaggataacatatccatcttatgattttttgtcaataatttgcatatgcattatatgtgttactagtgatttatacaatgaatgtctagtagtcatacaataagtcatacacaaatttctatttgataaaattaagtattataaaacagctgagtaaattaaccttatccagataggagatgactcgttttttaacaaggcgatgttgtttactattattgtaaattgaatatgattctctgtatatttctgctctcttaagtcctaccctattttcatatttctttcttttcgtaaaagtttcattataagaattcatatgattaaatacgtccaataatcaaaatacataatgttttatttgtacataaacctttccatattactttaaaagttattttgaataaaagcgg

SEQ ID NO: 388 - DNA, 2673 bp, Nezara viridula
caagatatgaattaatttttatctataagtagcacttcacaggtttttgagtaccttgtattatctgcattttttttgtgtcaaaaacaaaatggacaaagaagaaatcgttgctattcctacatttggatggaaagttaagttgaaccatgtatttagccaaaaaagaacccaatttcggttttattccctccgacagatcttctctctgttgccccttgtattcaggtatattatttattatattaaactgtggtggcatggatctaaacctggcatggattttataagagcagcaccaatagttccttataaaggtgttcctctaggtggtattggttgcggtacgattggaacaaaatttcagggaggatttaccaatattcaaatgattcctggtagttatgaattcccatcaatcacttttgatgcagctcagttcatagtaaacattcaggacaaaaataatgatacactgtaccagaaagtattgtcttgtcagagtaaaccaactggcaagaaattatcatcatgggaatgggattttcctggtgaagaggctgaatatatagctttgtatcctagatcttggactgtttttaacattccggaacaaaagataaaattggtttgcaggcagattagtcctgtaatacctaagaattacatggattcatctgttcctggtgcagtttttcattggattgtttacaactacaactccgatgatagacatataagtattacttttactttccaaagtggcagtggccttcactctcacaaaacaagcacagtaagcactaaaacttttcaagacaataatagtctcattgatgtgtatggtgttatcattgaacaaaaaattgatgattaccctcaatcatatggcattgccaccacaaagcaggaaaatggatcttcatcctactttttatattttaaccctaatgattctggtaatgatatttggaagacactgaaggccaatggagagcttcatcagttcacatcaacaaatgtatccaaagcagacaatgaagaaatggcatgtgctgtatgttatagatcttgtgttgcttcaaattcttcatctgactatattttttcattaacatgggatatgccaaagtttagcttttctacccaagacctaaagaggttttatacaaagtattttggggaagaagggaatgctgttcctcagttgtcttcatactgtataagtaattatccccgatgggaaaaagaaatatataactggcaaaaacctatacttcaaaataaatctttacctgattggtataaaagtgctttatttaatgaactttactatatctctgatggaggaacagtttggactttaatagatagtaatgataagttatctctgcatgatcctaggatagaatatggaagatttgcttacctggaaggccatgaataccgtatgtacaatacatatgatgttcacttttatgcctcatgctccttgatatcactttggccaaaactccaactatctgtccagtatgacatttgtgatgctattgaaagagaagacaaaactagaacatggtttttatataatgggaagcatggttacaggaaagtcaaggacactgtgcctcatgatttaggggatccagatgaaaatccatttgttttaataaatagctatccaattcatgatgtttcaacatggagggatttaaacctgaaatatgttcttcaagtttatagggattatgttataacaaaagatgttcaatatgtggttgatatgtttcctcaggttgttattgttatcaaacatgcaatgacatgggatagtgataatgatggaatgatagaaaattctggttatcctgaccaaacttatgatgcttgggttatgtctggtacaagtgcttattgtggtagcttgtggttagctgcattatatgttacaattaccatggcaaatatgattggagaacatgatatagcaaatgaactatctgatacactagtaaaaggaaagcattctttcgagaaaaaactttggaatggcacttattataattttgatagttctggaggcgcacattctactagtataatggctgatcagttatgtggcttatggtatcttcattgctgcaacattgaacagaatgttttcaatccaacatatgtactacaatcactaaaattcatttatgaaaaaaatgtttgtggttattttaatggctctcaaggagctgtaaatggaatattccccaatggaaagattgacagatctgccgtacagagtgaagaagtttggactggagttacttatgctcttgcatcattattaatttttgaggggtttactgaacaaggattcaaaactgctgaaggtttatatgatactgtctacaacaaatcaggacttggtttcgctactcctgaagcactttatgaaactaactcttttagggctctaagctacatgagagccttaagcatttggtcaatgcaaatggctattgaatctactacaacaaaacaaacttaatagtggtgcgatgtgtgccatcagattactcattttattcattcaactttgtttttattaatttaaaagttaaataaacaacacaaagtgatgagttttaaagtggattccaaaatcaacccttatttttc

SEQ ID NO: 389 - DNA, 4798 bp, Nezara viridula
aataaaatgaaatgtaggttaatttagtattgtcgcaacaaattctatccattaaaaatatgtaaatattaagataatgtatgttattccacaacgaatttaatgctgtttttgactaactgcatcatggatcttaacatccgcaaatgacgcaaggtctttggtatcgaggaaccatatttttctaacattaatgagtatcttgttatagaaaacggtcgttttatgaattaacacgcattaagttgttatctaagttataaatattttttacgggaacaaatataacaagttcggtttgttaaatgtggtcaaacttctacaataatagtggtggatagaaaaacatcagtgaaatcttgtccaggtgttaagacgtgttgacatttttgatgttctccttttaaaattgaactattcttcaagatcaacaatttttatggatccagttttttactgttggagctaatgtaatgttaaagaagaaatatatttgcagaaatagtttatatgaattatttacgacatgcaggaaattgccgtggtagggtgttacatcagtgatggtaacgttggttgccttaggggaatatggccaacaagccaccaccgcctgaccaaaacatcttagtgtacgttcaagattatgacaacagtacgctccaagccaccgtaaactcaagaaaaaattgtcgtggatatgaaggcccgaggtgtgaaacagcggctgcggaatcgacttgcagtttgccattgtctgattcagatatcgagtcagcccgaaattttaatcaagaatatgtcgcaccaccctatgggtggaaacgtattcacaccaaaggcattgtagtttatgtcagtccaagcaataccccattgagttctaccgagcaagtcaaagcctatttgctagccgaaggaacttgtaagtgtggtttggagtgccctgttaactgtgaaactacttttaattttaacccaaaggtcttaacgagaccttggactgctcctgctttaggacctggggatcttaacaaattatgcaaccataagagaaaattattgtcacaatcgtcttttgaatctatcgaaaataagtttgctgatgatttccgaaaaaagaaaaggagatttggcccaccactacctcaaccccatttgtctcataatgaacgtggattcaaggaacaagagcatactaataattataatggcttgccttggagagatagtaatcaagaatttcctcaggagccttatagcaatggttaccaacttaagtatgaagtttgtggaaatccacaataccaaaaggttcaagagaccaatcgattcggttcaccgaatcctgtcccgtcacaacaggttaattatgaacaaagagtatcatcatatggttccacctcctacgaagcgaaatataagagcagccaggcagtggaatatattcattcccaggaaatccagcctcagcagcaacccgcgcctcctgtccatgccgttcctaccggtctaaacgtcaataggactcctccgtggcagcaaaataaaacgcaaaccaatagctttgaaagggttcctacctttcatcaacataataatccttctagtacggtttggaataacgatttgaaaaagaagcaaactaaattcatcaggaagaggtattctgacgacaatatgaacccgagcactccagaaccacccccaagcttcatggaagatcctagcggctatttagcccaacagaccgccctcctcaatagcaccatctctcgccagagcagcccagctgtggacggcattcccctacctagctctttaaataagtacacctctaggcctaagtgtaagagtattatcactagtcgttttcccgattcttcggtcgagaggcggaagccagaagagccaagctctaccttacccgataagaatatagacgacaggggacccattcaagggacaactgtaagtacaagcaatcgcagccctgtcgaagccaggcctcctgaaaatgttgtaacgacaatggcttcagggcacactgcaagcagtaataccattacttccgtattagcaggtaaggcaaatactgctacggtgtctgttagcaatcccgggatacagcaaaaaccgcagcaaaatgatgagagcggaatccagcaggacgatgtgaggcagatcctagttccgagcccagggcagttagttgtcgctaattcagtacttcctggtcagagtaaacctgtaattaaccaaccaacagttcttctccctggtccgttgttgttacaacccagcgtcgtcgtcgacggcttaaatactacacttcaaattcctcaaatagttggcaatgttgttcaaaaccaagttcttgacgatacagctttactatcaccagagtctaaaagaaaagcgaatttgaagaaaagaaagctttctcctactataggctcgatgctcctttcgccagagtctaaaagaaaagcgaatttgaagaaaaggaagctttctcctactataggctcgatgctcctttctcctcaaggttctaataatgtaatggttcaacagcagcagctaaacgcacccatgctccaagctcttaccatactccctggtaaaacaggttttaccggcactcaacagttaattacgacaaacatgctccaacctttaaatcttgttcagaactttccgattcagcaattcattgttcctacaggagtgggcagtatggtcatgtctgacggaaccatcctccaagatactgtgcaacttaatctgttgactcccgttcagaatactggtgtttttagtaacgggcaaaatttacttactcctggtatggttattcgcacccccagtagccaaagcagtagtaaagtaattcaaaataatcaattcttgaattcgccgaatcaatttgttgttaataatgctttcaccgggccagtaagtccattactgaatgtcagtcccacacaatgtaatagaagccaagactttttatcccaaaatgttgttgtccaacagccaagtacgtctaatacaactgtagttcaacaaaatactacaatagttcagcaaacgacaatggtctccaaccaacaaacccaacctacacctacgctaaatctgaaccaaaattttattttgaatgacaagcctaattttattctgacgtctgaaaagcaaaacttcatcctcagcccgaataatgacaagataataataaatcctgagaatatgagggctaattttgttttaggaaacgttgataaacaaaactttgttatcaacaatatggaaaaacaacaaaatctcattattaacaattacgaaaaaaactatattgtggataagaaaaattcggtttcgacgcagactcaggttgcgagccctggtctctatcgcgagagtccgccagatactacgaccctcagccccgtggaccaagaagtaacgacttccttgcagcccacgtctcctcaggagtcgctgccgatggtgcattgcgtgtccagttctagccatcatgatgaccattcattctcggttgaaaactatttaggacacatgggaaagtctattcctttctctgatgcatcgtgtattactgtgcaaacatcacatagtaaagaaaatgaatacaaaagaaaaatgagcttatgtgaagttcctgataatgctgagttgccggacggtgaaacagtgagtagtacgtagcaattagtttaaacgctcttcctcttccagtctgcctctcccttctcgaggataacgcattataagatctcttgattttcccctcattgcacggtcatatatatggagaagaaaacaatcagttcatctccgatgaggaaacaattactgttgaagtgaaacctacagcagaagaaacagcaaatcttttgaataaagttattggtaattttgatgctagcaaaaccctctctgaagccttgtattcgcccgtggaagtttctagcaatattgaaaatgaccttcctcagttacctaataatttaggtgtatggattgatcccatagattccactgcggaatacatacgtggaggtttatgtatggagcaagattttattctttctgggcttccatgcgtgactgtcctcttgggagtctttgatatggattctggtaatcctttgattggcgtaataaaccaaccattttacaaggaggaatcaaatggatggagaggacgacatgtctttggaatcaattacaacggttttaaattgtcacaaccttctactcaacttctaaacccaaaggttattgctgttagttcatcagaaaaagaaggtataaaagaaactctaaaacaaaatggttatgaaataattgagatagctggtgctggattcaaattattaaatataatcttaggccaagtttgcgcttatgttttaagtaaaccaacttcatatttatgggacatctgcgcctgccatgcagttttagagtctatcgatggaggaatagtagattttaccagtttgagtccaatcaaatataaaggaaaagaagaaataaattgttgcaattctggaggaataattgcctacagaaacacagatattaaaaatgatataattgaaattttaaaattaaaaagctctggtgaatcctctcaggaaaatattaaataaaagagagaaaaatataacttatactaaaataaaacgcctgtaagacataatgctaagtgatgtggaataataatatatataattggctcaggaattttagtgctacattaatgata

SEQ ID NO: 390 - DNA, 4322 bp, Nezara viridula
cgccactctgttgtcgaggaggcttagttttgtgtttcttctgacaacacatgtgatttgagcggtttaaatacgattttttaatacgacattgtgttcaattgatgccgacgtttcgctgttccctaaaaccgggtctccaagttttgtaatgtgaatttatatttaaggataacgttttgaactgcagcttgttatgtagtggccagaaagcagcaatgactccttgacagtcggttattctactcttaaataaagatgtccagtgtgtctgtggaggaaggagaagcaggagttcgagtccaagctgaagctccacatcttgtcagcctcggaagtgggcggttgagcatcgcggtgacaattcatcctcttcctagtggaacaactgtcctagggagtggaaaacatgttgacattgttgtaaatggcctaggagttgacgagcagcactgttacattgagaacaatcgaggcatccttactctccattcgaaatctccacggaccacgatagatggtcttcctgttacccagccaactcggttatcacaaggatcaattataggcctcggacattcaagttacttcaggttcaaccatccagaccaagccaggttgatgaagaagacacttccagatcctaagaattcgatgcttcctttaacattttatcaaggtgcttgtgttgaaatggatggtaattcaccttatcatcaccaagaatctcgttcaagagatacatgctcaggcatcaacaattttgtgaaaatgagtcctaaaaatggtgagattatgaatggtgaactgagcccgagtaattggagacccaatgtttcaagtccttctcacaacaaagattcgactccattcactccttttaaacctcctccccattcttcatcaccctcacacaacaaacagaacaaatctgataaaaatgctaagaattgtgacatcgaagaattagacctcgatgagattctggccatttgttcagagtaccagagagaaaaccaaatagagaggagtactaaacccgttcaaaaccggataaaaaccaatggctctttaccgagagagaagagattgaactcgcccacgtcacccacccatcagcacagtttctcatttgatacaagtgacttgatgtatggaggtgaaaaagatcgatcaaaagataataaaaaatctctccatacatatgaaaatgtaacgtttgttcctggtagcccgagaccaaggattaaaacttttctaaacaaagatagtagtccaactaatgttagtaaccctcctgatggtcatggtggcaaccgaagtggcctacatttaaatctagaaccagtcatcctacgcaacaagtcatcctcatcgacgttcaatgagttatctgaacaaaatcagtcaatatcatcgatgaccagtaatctcgatggtgtaaaagaacgagacagagccagtggagagtaccaagacaaaggaaggccaccatcaatagctgatatgactgcggaaaaaaaatacaactttttaggctttgatccgaggaaggatactcctcccgatcaaactcctcaaaaagataccaccgaccaccgctcaggaaacttcactccttctcagattccacaatcccctccgtcatggaccaatcccactctcaattgcgaaaactttcctgattacgatatagtgaatggtgccgacgatgaggactgtaagagtagtaaaagattgagcaatcaactgtcgacaggaactaccaggagctcgattagtgctatagagagtttgaaaatggaacgggaaacgttattgaaaaatctttcatctttaaaagagaaaataactgaactagaacagcaagaagaggaattaatcagagagtctgccattgaagaagcacttgttagtggagaaatagcagctcaagatgaaaaattaaaacatgaagaaagtagagtcgctattttaaaagagaaagccaaagaatgcgatattgaaatggaaaaatgtctgcaacgtcaggctcaagggcaagaaaacttccaagttatcagcgaaaggcatatggcaatgatagacattttggaaaataaattatcgacatgtgaaaatgaagaattgaaaattcatctgaaagaagcgttgaaagaacagcaggaactgttggattctgaaagaaagaaccatgaagttttggaattccaactagtggaagaagaggcaagctggttgtctaaacgagaagacatacaaaaagatcttgatgaagcaatggaaaggttagctttgagaaaggaaaaggttttgaatctacattcttctcagaatataaccaacgagttagaaatacaaaagctttcacatttgaaggcgatagaagaaggtcggagtcgtctattgatgataaatgatgagttggaaacgttatccaaatcttatccgagtgcggactctctcatttctagcagttcagataataaagtggtgagaagaagggttaccagtcaagacgatttggatcggatatcgaagataacttcaggagcacctatcgatatgggctcatccaattctctcggcagaaggaccatagcttccctaaaagaaatcgaaaggaacagacaactacatttgattaatcaaggaagcctggtgatagaagaggaaaggcagagggtagaagagctgaagcggcaagttcaggacgaggtgaaagcccaatgggaacaacagaggaacagcaactgccaatcgctaacgagcattaccagcgacgactccagtttggagcctaccagggacagtggtgtaagcagtgaagaagttgaaaagaatatgatgtttcctgatgataataaaaatcgagattcttctgaaactcctgttgataacaatctcatcagcgagactccagaaagtagaccaacctcagacgtttctgggtacagcgatgatcaactgactgtcaaaattagatcaaaatctacatctaatctacaaaggccgctgacgagatacttaccgatcaagagcgagagtttagatctgagagcacacatcgagagcgctggacatcaagtggatctctgctctcatgttcagctggattcattgtcttgtcgcggatacctcagcaagatcggttcgagattcaaaactttggccaggcgatggtttgtctttgacagggcagcacgcactctgctttatttttcggactcctctgaaaagaaaaggagaggtggtgtacatttccaggatatcgaagaagtatatgtagatcacttgaacacattcaaatcaccaaattctaaagtaacctttgtcgtgaaaagcactacaagatcatatcatttgatagctccaagcccagaggcgatgaggatttgggttgatgttatttttactggtgccgagggttaccaacaatatcctcattaatttttacatttaattggtattagttctacatatatgaatataattatttatttatatttttaatacattcatccttttttttttttcttttttaatcatcagtacaaaagatttcagataagctagttgaagaatcattaatgcctttagcgttagttcacactgactgatatattttaaagcttagttagcgatatacaatgtaagacattcagtatttagtaataggtcttacgttttatatatatattattgagtttgcttaactcagggtgaagtgcctctttgttaaccgatacggtgcctgtaagccttatattattaacttagatgaaaacaaataaagtttatagttattaattgaaatgtttaaatttagatttaaataaaaaaaaaaaagaaaaagaaagatataattttgttttgttttgatttatttctaagaaccttcctttttgacttgtaagttcagaaaatattcttaagttatttctagtccttgaactgtgattgtttcacaaattgtattttttttttctgattgtattaattttttgttttattgttcgctggaaatttacagtgaaaaaataaatgaaatattgtgttgatttacttatatttttaaactcagcgtagctgataattctacttatgtggaaggttcactttcgaaaaagactaatttttatcaatttaactaaatgccttgttatttctttttttcaagaagaaattaattttcttaaaaaaattattgtattaattataaaatccaagattgatttttatttgtatatatttatgtatttgtaaatataattttatttcagagtaaactatattaggttaccaatgtataacattttttt

SEQ ID NO: 391 - DNA, 236 bp, Nezara viridula
atttttataaaaaattttgtcttaatgtatggagtccgagcaacagatttgatatcgttttctgattatttattttcattattagttgtcgttggttatattattagttgtcgttggttatgccgtttcgaatttgttattgatgctatcgttggagaggttttagtcgagtataaattgatacctacgagaaaggtttaagctgtgttttgaaattatagtatgttgggtctggg

SEQ ID NO: 392 - DNA, 908 bp, Nezara viridula
cgttactgctgcagccaagagtatcgaaagcgtagtcgcacatggtaaagaatttggcagcaactatcaggcatctgtgagtgtgggcaacattgctttacccagacttatcggaaaaagcggcacaaacttgaacgctttgcgtgatcaatttgccgtgaagattgacattgatgatggcgatggttccggatccagaggtcgtgaggtgaaagatgcgaatggaaagacaaacataaacttgactggcctcaagaagaatgttgatgcagcaactgcccacatcattctggtctccaaaaagtgggccgacgagaccattagtcgcgtccgtgttgagagcgagtttcacggccggatgatcggagcaaacggcgtctatatcaatagattgcaagcaaaatacaatgtcaagatcagattccccaactccaacggcaactttcacctggcagctgacgagccaaagtcaaaagatgagatcaccatcaagggcccctcaaagggtgtggccaaagccgaagaggaacttttggcgttgtacaagttcgagaaggacaatggctacaccgagaccattactatacctgccaagctcataccccgcgtgtttgggaagggtcatgaaacaatccgggacattgccgatggcgctggcgttgagtaccgttacaatcgagacgataaggctgaagccgagtcgggtgtggctgaagtcgttcttgttggttcgagggccgcattgaaggaagcaaaggccaagctcacagccttgattgacgagctcaaaaacttggtgactgtttccgtgacggtagatcccaaatatcatcggtatttgattgggccgcgccgcacatacatgtcagagttgattaagaatgcaggtggagacgatttaccagcac

SEQ ID NO: 393 - DNA, 502 bp, Diabrotica virgifera virgifera
gacaagtccattgtgttctcacaacagataaaataaataatatttagaataattttaatatattttaaattgtataaatgaaataaggttcaaaagaaatctcggattttcataatgtgttgtgttaaatgataatagatattaaccaaactttttccactccaaagagatatttatcaaaatggcaagttatcataatgaaaatgtatacacacatacattcactcctaaagaatatcaagttgaattattggaatctgcgaaaatcaaaaacaccataatgtgctccagcacaagttgcgccaaagcttttattcttgttaagttattacaagaattttcctggcaaatgcgaattaagaatggtaaaaaagctctgtttatcttagatccacagaatgttccgattatgacctcgcatataaagtatctaacagatttaaattgtattagcatcatggaatatactcttgatgccaaggaaaatggaattctggactag

SEQ ID NO: 394 - DNA, 277 bp, Diabrotica virgifera virgifera
gtgggcgaccaccagtggtactatgacaacttaaactatcctccacctacacaagctcaatacaatccccacattccaccccaatctagccactcttatacgcagtggtctcaatcgcaacagacatctacgaacgtctacagttatcctccagttccttcgtaccctcctcctccaattcctgcatcttatataccatcatcttctggagtcacccaacaacaacacttcgactacagatattcgcacttgcagtcccaatatcaaactacaggcg

SEQ ID NO: 395 - DNA, 502 bp, Diabrotica virgifera virgifera
gatgagtagccaagacttgattcctaggaactatcaagttcttttgatgaaaatatgtcttgagcaaaatactattatttatttaccaactgggtctggtaaaacatttataactacaatggtcctaaagcaaaaaggagaagaccttttaaaatcatacagtgagggcggtaaaatctctataatcttagtgaataccgtagcacttgttgatcaacatggatcttacattaccaatcatacaagcttctctgttggaaaatatactggtgagatgaatctagacttctggccaaggactaaatggtttaacgagtttaaccaatatcaagtattgataatgacgtcacaaattttggataacctatccaggactgattatatagatttgaacaaagttaatctgttggtttttgatgaatgccatcgaggcgtaaacgatcataccatgagaaatttaatgaaacgatttgaacatttgattgaccctccgagagttatg

SEQ ID NO: 396 - DNA, 275 bp, Diabrotica virgifera virgifera
tgttggaagaggccttggaaaaacggaagagaaaagcagcagatgccgggttagacgacgaagaaattccattcgaagaaaaaaacaagatcctcttaattgaaaaaggacaaaaccacttcgacgttcttccagaagggtggattcaagtaacacacaatagtggaatgcctatttatttacaaaaagtttctagggtttgttcattatctaggccttattttctaggtccaggttcagcaagaaaacaccatatacctgttaatgccatacca

SEQ ID NO: 397 - DNA, 277 bp, Diabrotica virgifera virgifera
gccgtattgtttatttttatacaaaagaatctgaaaattgtaaatctacacaaaaatgtcaaatcatgtcaaaaccccggcgatggttcttcaagagctggcaataaagaaaggctttcaatcaccacattatgaaattactcatagtgtcaccggaactcataacaatagattcgattatagagtaagagtagccggagtggaagcaactggtactggttgctcaaagcagattagtaaacatgatgctgcatacaatgcattaaagctgctagag

SEQ ID NO: 398 - DNA, 277 bp, Diabrotica virgifera virgifera
gtgcctccaggttggccaagaacacaagcacacatacctaccattagaagtttgcaacattgttgcgggacaaaggtgtatcaagaagttaacggacatgcagacttcgacgatgatcaaagcaacagcgagatcggcgccggacagagaacgcgaaatcaacaacttggtccgtcgagccgacttcaacaacgacgagtacgtacaagaattcggtctgaccatcagcaacaacatgatggaggtcagagggagggtcctgcccccgccgaaattg

SEQ ID NO: 399 - DNA, 273 bp, Artificial Sequence
  Synthetic
tggtgattaccgacgaaaacggcaagaaaaagcagtcttacttccatgatttctttaactatgccggaatccatcgcagcgtaatgctctacaccacgccgaacacctgggtggacgatatcaccgtggtgacgcatgtcgcgcaagactgtaaccacgcgtctgttgactggcaggtggtggccaatggtgatgtcagcgttgaactgcgtgatgcggatcaacaggtggttgcaactggacaaggcactagcgggactttgcaagtggtga

That which is claimed:

1. A silencing element comprising at least one double-stranded RNA region, at least one strand of which comprises a polynucleotide that is complementary to:
(a) the nucleotide sequence comprising any one of SEQ ID NOS: 1-398; or variants and fragments thereof, and complements thereof;
(b) the nucleotide sequence comprising at least 90% sequence identity to any one of nucleotides SEQ ID NOS: 1-398; or variants and fragments thereof, and complements thereof; or
(c) the nucleotide sequence comprising at least 21 consecutive nucleotides of any one of SEQ ID NOS: 1-398; or variants and fragments thereof, and complements thereof;
wherein the silencing element has insecticidal activity against an insect plant pest.

2. The silencing element of claim 1, wherein the insect plant pest is a Coleoptera plant pest.

3. The silencing element of claim 2, wherein the Coleoptera plant pest is a Diabrotica plant pest.

4. The silencing element of claim 3, wherein the Diabrotica plant pest comprises D. virgifera virgifera, D. virgifera zeae, D. speciosa, D. barberi, D. virgifera zeae, or D. undecimpunctata.

5. The silencing element of claim 1, wherein the insect plant pest is a Lepidopteran plant pest.

6. The silencing element of claim 5, wherein Lepidopteran plant pest is Spodoptera litura, Ostrinia nubilalis, Helicoverpa zea, or Spodoptera frugiperda.

7. The silencing element of any of claims 1-6, wherein the silencing element comprises a hairpin loop.

8. The silencing element of claim 1 or 7, wherein the silencing element comprises, a first segment, a second segment, and a third segment, wherein
(a) the first segment comprises at least about 21 nucleotides having at least 90% sequence complementarity to a sequence set forth in any one of SEQ ID NOS: 1-398; or variants and fragments, and complements thereof; or the first segment consists of at least 19 nucleotides having at least 90% sequence complementarity to a sequence set forth in any one of SEQ ID NOS: 1-398;
(b) the second segment comprises a loop of sufficient length to allow the silencing element to be transcribed as a hairpin RNA; and,
(c) the third segment comprises at least about 21 nucleotides having at least 85% complementarity to the first segment.

9. The silencing element of claim 8, wherein the third segment is at least 90% complementary to the first segment.

10. The silencing element of claim 8, wherein the third segment is at least 95% complementary to the first segment.

11. The silencing element of claim 8, wherein the third segment is at least 98% complementary to the first segment.

12. The silencing element of claim 8, wherein the first segment is complementary to a Coleoptera insect species; and wherein the third segment is complementary to a different Coleoptera insect species.

13. The silencing element of claim 8, wherein the first segment is complementary to a Hemiptera insect species; and wherein the third segment is complementary to a different Hemiptera insect species.

14. The silencing element of claim 8, wherein the first segment is complementary to a Lepidopteran insect species; and wherein the third segment is complementary to a different Lepidopteran insect species.

15. A DNA construct comprising a polynucleotide encoding the silencing element of any one of claims 1-14.

16. An expression construct comprising a DNA construct of claim 15.

17. The expression cassette of claim 16, wherein the polynucleotide is operably linked to a heterologous promoter.

18. The expression cassette of claim 16, wherein the polynucleotide is flanked by a first operably linked convergent promoter at one terminus of the polynucleotide and a second operably linked convergent promoter at the opposing terminus of the polynucleotide, wherein the first and the second convergent promoters are capable of driving expression of the silencing element.

19. A host cell comprising the silencing element of any of claims 1-14, the DNA construct of claim 15, or the expression construct of any one of claims 16-18.

20. The host cell of claim 19, wherein the host cell is a bacterial cell.

21. The host cell of claim 20, wherein the bacterial cell is an inactivated bacterial cell.

22. The host cell of any of claims 19-21, wherein the host cell comprises the expression construct of claim 16.

23. The host cell of claim 22, wherein the expression construct comprises a transcriptional promoter operably linked to the DNA construct of claim 15.

24. The host cell of claim 23, wherein the transcriptional promoter is inducible by exposure of the host cell to an exogenous molecule.

25. A composition comprising the ribonucleic acid construct of any of claims 1-14, the DNA construct of claim 15, the expression construct of any one of claims 16-18, or the host cell of any of claims 19-24.

26. The composition of claim 25, further comprising an agriculturally acceptable carrier.

27. The composition of claim 25, further comprising a herbicide compound, an insecticide, a fungicide, a nematocide, an agriculturally-acceptable carrier, and/or a bacteria, or combinations thereof.

28. The composition of claim 25 or 27, wherein the composition is in liquid form, solid form, or gel form.

29. The composition of claim 25, wherein the composition is solid form.

30. The composition of claim 29, wherein the solid form is a pellet, a powder, an aggregate, or a molded article.

31. A plant cell having stably incorporated into its genome a heterologous polynucleotide encoding a silencing element, wherein the polynucleotide comprises:
(a) the nucleotide sequence comprising any one of SEQ ID NOS: 1-398; or variants and fragments thereof, and complements thereof;
(b) the nucleotide sequence comprising at least 90% sequence identity to any one of nucleotides SEQ ID NOS: 1-398; or variants and fragments thereof, and complements thereof; or
(c) the nucleotide sequence comprising at least 21 consecutive nucleotides of any one of SEQ ID NOS: 1-398; or variants and fragments thereof, and complements thereof;
wherein the silencing element has insecticidal activity against a plant pest.

32. The plant cell of claim 31, wherein the insect plant pest is a Coleoptera plant pest.

33. The plant cell of claim 32, wherein the Coleoptera plant pest is a Diabrotica plant pest.

34. The plant cell of claim 33, wherein the Diabrotica plant pest comprises D. virgifera virgifera, D. virgifera zeae, D. speciosa, D. barberi, D. virgifera zeae, or D. undecimpunctata.

35. The plant cell of claim 31, wherein the insect plant pest is a Hemiptera plant pest.

36. The plant cell of claim 31, wherein the insect plant pest is a Lepidopteran plant pest.

37. The plant cell of claim 40, wherein Lepidopteran plant pest is Spodoptera frugiperda, Ostrinia nubilalis, or Helicoverpa zea.

38. The plant cell of claim 31, wherein the plant cell comprises the expression cassette of claim 16.

39. The plant cell of claim 31, wherein the silencing element expresses a double stranded RNA.

40. The plant cell of claim 31, wherein the silencing element expresses a hairpin RNA.

41. The plant cell of claim 31, wherein the silencing element is operably linked to a heterologous promoter.

42. The plant cell of claim 31, wherein the plant cell is from a monocot.

43. The plant cell of claim 42, wherein the monocot is maize, barley, millet, wheat or rice.

44. The plant cell of claim 31, wherein the plant cell is from a dicot.

45. The plant cell of claim 44, wherein the dicot is kale, cauliflower, broccoli, mustard plant, cabbage, pea, clover, alfalfa, broad bean, tomato, cassava, soybean, canola, alfalfa, sunflower, safflower, tobacco, Arabidopsis, or cotton.

46. A plant or plant part comprising the plant cell of claim 31.

47. A transgenic seed from the plant of claim 46.

48. A method for controlling a plant insect pest comprising feeding to a plant insect pest a composition comprising a silencing element, wherein the silencing element controls the plant pest, wherein the silencing element comprises a sequence complementary to:
(a) the nucleotide sequence comprising any one of SEQ ID NOS: 1-398; or variants and fragments thereof, and complements thereof;
(b) the nucleotide sequence comprising at least 90% sequence identity to any one of nucleotides SEQ ID NOS: 1-398; or variants and fragments thereof, and complements thereof; or
(c) the nucleotide sequence comprising at least 21 consecutive nucleotides of any one of SEQ ID NOS: 1-398; or variants and fragments thereof, and complements thereof; or
wherein the silencing element has insecticidal activity against the plant pest.

49. The method of claim 48, wherein the composition comprises a plant or plant part having stably incorporated into its genome a polynucleotide encoding the silencing element.

50. The method of claim 48, wherein the silencing element comprises a double stranded RNA.

51. The method of claim 48, wherein the silencing element comprises a hairpin RNA

52. The method of claim 48, wherein the polynucleotide encoding silencing element is operably linked to a heterologous promoter.

53. The method of claim 48, wherein silencing element is encoded by a polynucleotide, wherein the polynucleotide is flanked by a first operably linked convergent promoter at one terminus of the polynucleotide and a second operably linked convergent promoter at the opposing terminus of the polynucleotide, wherein the first and the second convergent promoters are capable of driving expression of the silencing element.

54. The method of claim 48, wherein the silencing element comprises, a first segment, a second segment, and a third segment, wherein
(a) the first segment comprises at least about 21 nucleotides having at least 90% sequence complementarity to a sequence set forth in any one of SEQ ID NOS: 1-398; or variants and fragments, and complements thereof;
(b) the second segment comprises a loop of sufficient length to allow the silencing element to be transcribed as a hairpin RNA; and,
(c) the third segment comprises at least about 21 nucleotides having at least 85% complementarity to the first segment.

55. The method of claim 54, wherein the third segment is at least 90% complementary to the first segment.

56. The method of claim 54, wherein the third segment is at least 95% complementary to the first segment.

57. The method of claim 54, wherein the third segment is at least 98% complementary to the first segment.

58. The method of claim 54, wherein the first segment is complementary to a Coleoptera insect species; and wherein the third segment is complementary to a different Coleoptera insect species.

59. The method of claim 54, wherein the first segment is complementary to a Hemiptera insect species; and wherein the third segment is complementary to a different Hemiptera insect species.

60. The method of claim 48, wherein the plant is a monocot.

61. The method of claim 60, wherein the monocot is maize, barley, millet, wheat or rice.

62. The method of claim 48, wherein the plant is a dicot.

63. The method of claim 62, wherein the dicot is kale, cauliflower, broccoli, mustard plant, cabbage, pea, clover, alfalfa, broad bean, tomato, cassava, soybean, canola, alfalfa, sunflower, safflower, tobacco, Arabidopsis, or cotton.

64. A kit comprising the silencing element of any of claims 1-14, the DNA construct of claim 15, or the expression construct of claim 16, and instructions for using the silencing element, the DNA construct, or the expression construct as an insecticidal agent against a plant pest.

65. The kit of claim 64, which comprises two or more silencing elements of any of claims 1-14.

66. The kit of claim 64 or 65, wherein the instructions provide for sequential application of one or more silencing elements to reduce the incidence of the insect pest organism developing resistance to the one or more silencing elements.

67. The kit of claim 64 or 65, wherein the instructions provide for concurrent application of one or more silencing elements to reduce the incidence of the insect pest organism developing resistance to the one or more silencing elements.

68. The kit of claim 64, wherein the insect plant pest is a Coleoptera plant pest.

69. The kit of claim 68, wherein the Coleopteran plant pest is a Diabrotica plant pest.

70. The kit of claim 69, wherein the Diabrotica insect pest organism comprises D. virgifera virgifera, D. virgifera zeae, D. speciosa, D. barberi, D. virgifera zeae, or D. undecimpunctata.

71. The kit of claim 64, wherein wherein the insect plant pest is a Hemiptera plant pest.

72. The kit of claim 64, wherein the insect plant pest is a Lepidopteran plant pest.

73. The kit of claim 72, wherein Lepidopteran plant pest is Spodoptera litura, Spodoptera frugiperda, Ostrinia nubilalis, or Helicoverpa zea.

74. A DNA construct comprising a heterologous polynucleotide, wherein the polynucleotide comprises:
(a) the nucleotide sequence comprising any one of SEQ ID NOS: 1-398; or variants and fragments thereof, and complements thereof;
(b) the nucleotide sequence comprising at least 90% sequence identity to any one of nucleotides SEQ ID NOS: 1-398; or variants and fragments thereof, and complements thereof; or
(c) the nucleotide sequence comprising at least 21 consecutive nucleotides of any one of SEQ ID NOS: 1-398; or variants and fragments thereof, and complements thereof;
wherein heterologous polynucleotide encodes a silencing element having insecticidal activity against an insect plant pest.

75. An expression construct comprising a DNA construct of claim 74.

76. The expression cassette of claim 75, wherein the polynucleotide is operably linked to a heterologous promoter.

77. The expression cassette of claim 75, wherein the polynucleotide is flanked by a first operably linked convergent promoter at one terminus of the polynucleotide and a second operably linked convergent promoter at the opposing terminus of the polynucleotide, wherein the first and the second convergent promoters are capable of driving expression of the silencing element.

78. A host cell comprising the DNA construct of claim 74.

79. The host cell of claim 78, wherein the host cell is a bacterial cell.

80. The host cell of claim 79, wherein the bacterial cell is an inactivated bacterial cell.

81. The host cell of claim 78, wherein the host cell is a plant cell.

82. The host cell of claim 78, wherein the host cell comprises the expression construct of claim 76.
